United States Patent Application Publication US 2006/0040262 A1 - sequence listing, part 3

SEQ ID NO: 178 - DNA, 92969 bp, Mus musculus
  misc_feature (1)...(92969): n = A,T,C or G
cctccctccaaggcttgctggcatgtcttaggtgtgggggaaagcccagagctgggagaatataaattttgtgttcccctgcacctccccctcctgtcacctctcattcccctgagtctctgtggggtggaatggagagaggggactaaaagacctgggagccacatccacaacaggtaaagcaaggcgagagtcatcaggaactctcagatgagattgccttctggaaccttctggaatctgagatcataagaactggtttgagatgcgagcagctaggacctgttgtgaagggaggcaggcccgagtgtgagtttgggaaggtgagctgtgcactactggggtgtgtgagcgtgcatgtgtgtgactctctgtgtgagcacgtgtgtgtgtgtgtgtgtgtgtgtgtgtgtgtgtgtgtgtggcactccggtgactgggggtggggaggcagtgggtgaacgtgtgcgttttgttttagttggaggaaaggggcagagtggcttgatccagagcttggaactgagggtgggggaggggagagcacggcttcacatcctctggagaagatggaggtggaggacctttgctgccagaacccaccctggtctctgctgccccggcctgcttcggcgtgcgggtgtgggcacatgaccactcagtaagaaagagttcctgtcagggctggaaactgcggagccgctctggggcaggctggcagggcttacgggaggcccagacctggggagacaggagtctgggattgctggagctcagggagaggtggaaacacagccctgaggatgtttgcagggcatgaatggcctacttactcacctgggcaaagacggacattgcctttctgtgtgcagactggcctctcttccctgccagcctgcattctggcctgactcagggggcacgaggcgggcggaagataaggggtgagttttgacaaacgtcgagaaacctaatgcctggcagctctgggctttggccagttttactgaactcattcatattggtaagcttcagccctgagggctggctttccacctacaggccaggccctgtcctctgcccgctggagacctgtctgtcacttggtacttttccttcctcccaccacctcggtttcccaagcatctgacaggcctgtgtccggtgagcaggtagctaccctagaagtgcatgtgagtgcctctgtgtcccaccctgtggtggccacaaatgatcgctgtcacctccccctctgccccccagccccttccctcctcagatcaaggacttgctcaggagtttggagctggatccacaactggctttcagaagtgggtcaatgaccccctgaacagggcgcttgggaccttggtttgccaatggcttccccctgtaacaaaagccccagagagctgcaggctttgcgtttcagagctttgtgcccggggctgtctgcttgtggttaccgaagagcaaactgagcaaactgggctgctggctcagaggagatacaggataaggaaccaggcctaggggacccctgggtgaggtacagcgtcaggctatgtgggctctggggtggggagagggctgtggaagggtgggatgcccaaagggtagatcctgggggcgggggcaggtttacagagaggactggttttttttttttttttttttttacaagtttctaattatatttatttggagttttcctctggtggtttgaagctgttaacagcaggaacctgtatcccctgatgtttgtttttgtttctgaccagctgcttggccccagagtagtgaatccccaggctggctacaacacctgcccaccactgcaccctcccaccttctcctccttgcctgtgtatctgcccgcgccctgtctaccctggccctggttccctctatacgtcccgtcccggcatctgtactctggcttttaaccaccagccagattcagctgtagtctatcttgggctctgtgccggttggttgcttcaagcccaacaaagtactgagctgagggcatggggaggcgatctctctctctctctctctctctctctctctctctctctctctctctctctctctctctgtgtgggtttggatcccgcctttacactggctattggttctttcccaggataacttcagtaggtgctccccatccatttaataaaccatgcctgctgctccccaagagggtaacaaaggagcccgcgctcctcccatccaccatttgcagtctcttctagccctggattgattcatcagggcccaggacgctgtctttgtgctctcttgaatctgtgtatgtgcagacacactgccgcagcacacacgtggaggtcagaagacagcctccggagtcagctggcttgcaatctggggactctcctgtctctgcctcccgtttttgctgtaggagcactcagactgaatctagccttacatgagttctgggaattccagctgggggccttcacggtcacatgaggtgctttacccagtgagctttctgctcctcagaataaactccctaggacacccctgttcccagaatgccaaatggtcaaaggagagtaaagaggcaggcttcttctctggtgtatcccgcaggtagctgccatctgtttaacagatgccctcagagctccttcattacatggttactctgtcccactcacaagggagcccacagccctggcacagtgcttgcccttgtgcaggtccctagtggctgtttgctaagtgctcaagtgtgcacggctctgctggcagttattgtgggttcaaagatccagaagccatggcctcgaggaattcatggcaccgagcgaacatgaagcaagcatccaagaggatgctgaggaggatgagtgacagcagcaagctcccattgggcactccctgtgtccacacctgccccaggactggtgtagtggcactcaagtctagaacctcgtctcgtagtgtgtctgtcacgttgctgcctccagagtgtctcccagttcaggcaagtagcttatttacacaagttggaaaagagagatagacaggcttgccctggaggtcctgatttcctgggtttagacatccatgagtcttcacaggtccccagattccagtgcacagcctgagtggaggaccaccatcctaaaccaactcacgcctaaaagtgtcgcttggcttgcagctggtaaacagcttctaagaggatggatatgttgagggtgcccgtgtgtgccaccaaggtccctttgaggacttatttagggctggcaggtgtgctgagaaggatctttgaagacctggcagaggtggaaatgctgggtacgatttgatttagggccttgtctcgctgctctgtgcctcaggccagaaaacttcagccatgccgttggaagtacctttcttcagcagtcgccagccatgggagaggctacatgttacatgagacagcttcagaatgttagctaagtggctcagcaggaaccacaaaggggggcacgctcagtccccctcaggctgggagcttactggggacagggcagacaattctgagccagtcttggaaaacagaagtgggtggggttgcaatataaacgggaagaaggtgggatgcagtggactggttagctggtgctgagggagctggtaccaagggagtagctggtgccaggggagtagctggtgccaagggagtaggagcagggtgagacacctcccagagcttccaaagcataaaacattgggagcagggagatggctgaggctaggaagagcctggggcagccagcgggctgtggtcggcttcaccgctgctctggtcctgggggccacttgaggggagacaaagggaagagcctgatgcatcaggagccaaaccccagcacatggagacaggcgccactgagatggtggcgggagagggacttctggaggagtctctagaattctgggccagacccagaagcgttccttattcagagcccctagagctatctcttctgctccgtgaagtctgtgcccttgggacggttcctattgcacagcccaccatgaatatctggcctaaggccagtgggactgaagagctgtctttgagatgaaaagggtcacatgtggctcatggctaccaccgcagtggacagaagggacttggatcccacagtgctcagccctcagcctcaccctctcaagctcaggcagtccacacagattaacaagtgaatggcctcgtctggggaggcgccaccatgggatacatggtatgggggaaaatctaaggatggaaagtgagaaaggagccaggtgtggcggcagggcaagcacctgccatcccaacactagggaggctggagcagggggggtcatgagttcaaggtcagcctgtgctatatagtaaagctttcttaaaaagaaaacaaaacaaaaaacaaacaaacaaacaaaaccccaccttccccagagaaatggtcgtgctggatcgtaacctggggcagtctccacgggtgactttattgtgaccggacatttcttgcttctgattccattccatcagttggtcaaacattccccaacagcctcgtgccacccacaagatctctcttacttgacttaggaactcgactactgggcctctcttctctccattgtctctctttggtgactgcttggcaggcacatgactgccgagcttgtctgaggtgggcagtaagtgtagacagtctcctgtttctgcaaatggcagagacttccagtgtgcggcgcacgtctccgtttagttgccacgccttaaggagctgggttcacaggattgggcgatgaggcctgagaatctgcattgtaacaaaccccactttgctcacgggtatgcggctcaggcgtcagagcagcctcactccagggcctctgcccctttactggcagacttcaacccatacactctgtttttccagtttgtagggagacatgggctctccctactcagactgtgacagagggtctcaagcccagctgctcactggaatcggatgtgttgagtccagttctttggggccttgggcatgtttaggggagtcggctctgctgtgcagcctgagttgaggctcatccctaatgcttctgtcacttatcctggttggctcgttctgaatgcaatgactgccacatagggccttgtcctcacgtcacttttttatgggtgccgtgatgtgatccccagttgcttacgatcattttcttctttttttttttttctgaggcagatttcttagtatagtcctggatagtcctctgtagtccaggctggcctccaagtcagagatcctcctgcctctgcctcccaagtgatactccaccacacctagaccaccggaggtccttaaccacccccctacccttaccccaccccctgctctggaggagtcccttcctttagtgtcgctctgtctgtcacacttactagagggagcaatgagtgttagtccagaagtatccagaactcgagggcatagaggaggagaggggaaggggctctgcctggtcagatggctcagagagctgtgcctgccaggccaacacctgccagctcccggtccttccattgatagctcagggccaagagaagctctgctcctctaatgcttcttggtgccatggtgaacaaggctgcgtgaacagtcgggagctgacttcatctttttctgggtttttgagacggggtctgaactcctgatccttctgcctcggtctctgggtttatttgaattccggaagcgttcagaggaaggcaagggaagctcaggtgtgcacaggcatatggggacttcgcctttgggaaacacaccttcacagctcacttgacaccagttctgtacctatgtattcttgtgtgcaccgtaaccgagtgctgggatcacagctgtgcagtgctgtgctgggcaggactagtgtgttctacagtggaccaggaggcagatgaggatcccagacagcccccacctccctttcttccttaattactagagagcagctgggcagggtgtggcatgcctgtaatcccagcctttggaagatggaggcagggggagcaggcattgaggaccgccctcagctgtggaatgagttctaggccaacttggactatatgtgttctgatctagaaaaacactatcagtgatcactgtaccatcaccagtgactctgtgcctgtctctttcccttcaagttcactgctaagaaagataaactagtcctcactgggctctgtctgacacatcacgtgtgctactcaaactgaagagggtgtttcagagagtggtgccgctgtcaccatagtggtttgagtatttctgagacagtctgaattcctgaagtgttcagaggaagcaaggggacctcaggtgtgcaccctcgggtgtgcatgggcatacagagacactgcccctggggaacacaccttcaaaactcacccaagacatgccagttctgttcttacgtgtcctcctcggcccctggcagatgtagatgagtgtgtggaaggcacggacaattgccacatcgatgccatctgccagaataccccacggtcttacaagtgcatctgcaagtccggctacacgggggacgggaagcactgcaaaggtgagcctgggaggtctccactgcaaaggtgagcctgggagggtccccaggatgggaagcactgcaaaggtgagactgggagggtccccaggatgggaagcactgcaaaggtgagactgggagggtccctactgcaaggtgagcctgggaggtctccactgcaaaggtgagcctgggagggtccccactgcaaaggtgagactgggaggtcctcactgcaaaggtgagactgggagggtccccaggatgggaagcactgcaaaggtgagactgggagggtccccactgcaaggtgagcctgggaggtctccactgcaaaggtgagcctgggagggtccccactgcaaagatgagactgggaggtcctcacagcaaaggtgagactgggagggtccccaggatgggaagcactgcaaaggtgagactgggaggtccccaggaggagctcgcaggagcctcggggcctgcaccatggtttccaggggcccacaacctccacaggccgaggaggactgccgcatcttcccagagatcgcacagggttggggtggacaccaaagcatcacacagccaagctgtgctggtggggacacacttcatagccttcatagctctctggggctggcacacctcagttacaaaactaaggcccgaagatccctgagacaggagcctgtactggcgcctgtcatagcatgcgcaaaggaccagacctgtgaaccccagtgggagttcacccacaagcaagcacatcacttgctataaaaacactgcagagtggctgggaatagcattctcagggacaaagtacacgttactttctgttgacataatacactgagaactacagtagcctcctgggacccagggaatgggggtgttggttcaaggatgacagtccttcccagtaataccacaactaaagaacgttcgagaactttatatgaatgatgtaatcaaaagcatgaaattaaaaatggcatagctgtttgcctgtgaccgtcaacatcttccggtgtgttttttctctctgcacagacgtggatgagtgtgaacgggaggacaacgcaggctgtgtgcacgactgtgtcaacatccctggtaattaccggtgtacctgctacgacggatttcacctggcacatgacggacacaactgtctgggtgagcgagagagccagggctggtggcccgggactggttggggaaggagctgctctcagtgtgtcttggccaagcaggaagaaagtggtcaaaaagagttccaggcttttaaaagcaaggatggggtagggcactgctaatgtgtattgcgtgcgtgcgtgcgtgcgtgcgtgcgtgtgtgtgtgtgtgtgtgcaggcacgagcgcgcacggaatgggggtgggttgacattaggacccttcttctaaagtcttttttttttttaaagatttatttatttattatatgtaagtacactgtagctgtcttcagatacaccagaagagggagtcagatctcgttacggatggttgtgagccaccatgtggttgctgggatttgaactctggaccttcggaagagcagtcgggtgctctaacccactgagccatctcaccagcccctcttctaaagtcttaaagtgtgtgagctccttaggagcaggtgtgtagaaagcactgtgcagctgtagcacagggcaggtgctgaggcaggagcactgttgctaatgcagttggatgctctctgagccctggatgcctctgccccttgtctcccgcctcccttcctgtcttaagactcatcctctccagttcagagccttcttggtctggcccggggaatcacctgtccccagaactctatctggggtagaatcactgacctcagctttagccagtcatcttggagttactcggaccctgtcagagtttcctctacgtaggaactctgaagcttctaacaggatttgaaatttgagactggggtcctctctcaaacgtctgttcgatgagtcagcaaagggaagaacagcaatggaatggcaatggctggaacatggtagctcagatgctctgtgacctaggaacccccttactgcatagctgccatgtggtcatcttctacccaggtccctggcaggcccttctccggggctcccctcccccgcccttctgctactatgaaagagctgtctctcccctgtcaccaaaggactatttagggacaagatctgaagtactcggtacagggtaggggtgcccacatgaccgtgaataccatctttgattctttggtctccattgggtcctaaccccaactatcaccaaccaaccatagagacaagggaaagaacaggtactgggagggtctgagttacaaaggtctggtgaaggtgagtgttcacagcctcaaccatccctctaacctttgagaaaactccaagaacacgcatgggtctcagtttctccagggagaagtagagggtgggagggatgcagccaggatggagatggagtccagatgtccaagtgatgaatttggctgtagtggtggtgactccgggctccctattgttcccctctaccatccagggtgtggcctggccaccttccccacccttccacgccgcattgccaggctttgttttgttaaaccaaaaataggagaaaagctaggaaatctgtggcagtgagcccaggcctgggggaagggagcacggctcgagttgtggccagtccacagaaacggtccttgccccatgaggacctgtggctcagaggccattcccaccatcgttggcacctcagccatacggctatctgaggaaagagcctttccaggttctctgattcctggctgctcatcagagccagcctcgacatggccctagtgcgccatggccgctcagtgggactagtacccatccttgtcttcaccgaggttcctctcgctctggcccagggtttcggtgtatgggagtttgcatgcatgtgtgtctgtgcaccacatgcctgcggggccagacgatgataccgggttccttgggactggagtgtcaggcagttagcagccatgtgggccctgggaataggacgcaggtccgagggttcagacgcagcctttacagcgtgggagaggagtccgggcctcaccttggctggccaggtttggatgttgcctgccctacctgagctctggacaaaggtgcctcttcacactcagggaagttttagctgacaagggctaaggagtgcttgctaagggtgggcctgtggtgtgtgtgtgtgtgtgtgtgcgcgcgcacacgtgtgctcacaggcattcttcagtctgccctcagtctatgctgctgctacaacagtcccaccaagcccctgtcttcacagatgtggatgagtgtgcagagggcaacggtggctgccagcagagctgtgtcaacatgatgggcagctacgagtgccattgcagagatggcttcttcctcagtgacaaccagcacacctgtatccagcggccagaaggtcagcccacggccatctaggcccccaggcttctcttcccagctgcccctcagcactctctgtcccacactctagactcctagcgtgcttagacactgtattccagactaatctagggaatggaaccgggacctgcccagagtagaaacaaagctattttggggcattctctggtccggcggtacggtgctgcaaattcctgctcgccagcatttgtctgtaagctgttccttccctgggacagcctcacctgcgtgcgtccctttccacagcctggatccatggctcatttcctcactgggccatgatggtctgagagcagcagggaagtccaatttgcctttgtgtccctgtcacttagcgtgctgccctgcctgtgatggcagcttaataaatctttgtggtctagccaagtgtggtggcacacacctttaatcctagcctgggtggggggaggcagaggcaggcctatctgtgagttccaggacagcctgactacactgagaaaccctgtctcagtctgatggctgtttctcttcttcaggttcctagtctcagtgtaagctctctgaggaaagataccctgttttagtttctctgggtccctcctagatccggagagcctctgagtagcaggctcagctgattcttagagtgtccttagccacagctggttctgccccattgaggctcccagtgcagacagagcgccaacgtctccttctccctttttagaaggaatgaactgcatgaacaagaaccacggctgtgcccacatttgccgggagactcccaaggggggcattgcctgtgaatgccgccctggcttcgagctcaccaagaaccaacgggactgtaaatgtgagatttgtgagggcaggagaatgggggggacaggaaggtgtggggcctcagtagccagagggcagggatgagatgaaagaggcctgggggcggggcacagtgaggaaaaggggcagctttccccaccttgaagacctgcagcacaagggacaagcaggctgacatgtctcctctctgtgcagtgacctgcaactatggtaatggcggctgccagcacacctgcgatgacacggagcagggtcctcggtgcggctgccacgtcaagtttgtgctccacaccgacgggaagacatgcattggtgggtgaagccacttgtgacaggattggggtggggtctgggacggaaggggaagagagaccctgggggacagtgatgtctaggtactggatagttactgatgtgggaatgaagaccaatgagaggacaggtggaaggaccactctgagagactaaagggcacacttgactacctgccctccccaggagtcccaccctcctcttcctcccatgttgaaacattaccaggttcggaactgttagcaggggtgctgggcaaccaaggcttgaggaattctggggcggtcagctgagcggctgacccagtctctggttgactagtgtggtaggggaatgaccacagccagtgtccctgctgtgaactggtgccaggacacagtagttgcttccagagcagttagccttgggctgaaatgaatcagtagggtggctccagcccctctcttcctctttaccctggcaaacccccttcctacccctcacctgatgccccaggcccacctcacacccaagcatctggtggtactgactttccagtgtgcctgtggctgcccaccccccctcacttgctgcagccttcccgtcctctaagcctgagacccttcttgaattcctaggcctgacctgactctccaggttcctggatgagctaagtccttaaagtgaaggttgaattccttccgttgctatttcttgagcggtgagagggctgacaagatgtcttcttggagaagtggggagtgaaaggcagggctctggctgggcatgaggcagggctcgggccagtcagaggtacttgtgcttgggctgtggacagtggtgcttatggaggtgtgtgtcactgcagccacaggacggggatcagacaggctcacaagatacacatgctttcaaaggctgctggagccgaagctctcccaactctgctctctaactcttctgagaccccaagacaggctcagggcttcatgctgctttttctgactgctgttccagctcccttcttattctcctgacagggctagttcttctgctttgcaaacctcccaccaccccctggacacaccacaaagcctccccccccccattcttccagaaggaactgcatggggagaagatgcacgaggcaggacagaggcccctggggcaggagaccctgttcccttgttctcagacggctgctttgtaattaggcttgagctctctaaccccactgagacccactgagtcctctgggcagagcaagtgatgctcctccctccccatccttctccctttgcccccagggagtgagcctacttgccttggacttaatttttcttggcagggggaaatgtcactggggttgtggggacatgcagcttgagtggcgagacaggagtatagttaagggatttagaggtggcgagatgcgaaacttgacacccgtgccagttttgcctggcatgctgtgcgtgctatgcgggggttggacccgcagctgctctctccgagacccagcatctctgctttatggtcccttgatgggggcttgatttctttgagggtaccaggcaggacaaggctgaggagcaaggctaatttgggatccctggaatcaccacatggggctagtggtttggaccgtcagggtggagggtgcggggtgggccttgccccaatctaaacggcttttttacaatgtcaaacaggggaaaggcggccagagcagctcgggcccactcaggccgtttctaatggtaaatatgcctgccctccctgtgcttgctagggaagggctaacccgctggggctcccactaaccttgcatgccctccagggctcccctggcagtgcgggctctggacccatctggtggcctaggaagcttcctgctggtcatcttcctggtccctggctctccttcttatgcctcctccacctctcattgccctggtcggtccctcccagccatgtgcacccctcggtccctgcagccagtgccatcttgcccactgttcgcactgtggctgagggaagtatctcagagctgaatgtcatcttctctgtgggccacccttcttgggttccttcctttctttagcacaccacacagcctcagctggtgatttctgcctgactctgggtccctcaccagccgtcttctctgagccctcagcccactcctctggaggaggggagtgacagtcttccttctcttgggtgtgataattatcatgtggtccacgcctggcacaaaggacaggtcgagctgtgccctcctccctgtgctcagccattgtcccgcagagctgagcatctctgcccagcttcttggtccagcctggggtgtatgccatgccagttctgttagcacccatcctggctgcttcagaggatctacacacagacagcatcttgtcccccactgtgcttctccaggccttgggagccctcggtccatacttagagcacttttgggggagtctggacttgagctcctcgcggtctgggggacctcggggagaccacagtgagaccagggcaggccaaggactcccaggcagaggtgggcttcttttggagccctggcacactgcccactttggggacaagggtgggcctaacatcctcattcttagaacaactcttctctcttgtcccatggaggccttaggatgccagtgggagaagacttggtgcctgggacagaccacagcacccaggtccccatgccaggctcttgctgtcctggggctgatggctttccccagaactctctctccaaagcaactgtttaacatctggtctcctcctgctctggcctctctgccacagactgagctgacaggagagacctagctgaaagctctgagctttctcttctgtgtcttccaccatctctcattctttctctggattcttctgcgctctccccccccccaccccgccgcgccccccccttcacaaaatatctcatcagcaaaagcaaagaaccagagagccaccgtgtttccaggtagacaggagggtttggggaggagtgaaaggagggtgacccagggctgcagtgtcagaagggtgggaggggttgagggggggtggagggtaggggataatagggggtcttgggggtgaattgatggggagcccttagatcttgagacactctttcctcgaggccttttaggagactgtccatcacaaacacccacactcatcctcaagataggaggatgaaactggtctaccccttcttttccctcaggccttaggatgctaatgctccgatgctcggtgcctaggacgagccctctttagctttcctctcctgctcccctgcccccacccccagcacattcctgcctgacagctctggcttgtacctgcctcactgctgcccaccttgtttcaatcaagtagggggcagggatgctgagcgagcggagcgcgagagagagagcgcttcctgcacttgtgaggggtgggaggaaggagaggctggagcatcgcttaacgctcctgctgacccccccccctccaccctgtgaggtggctgagggcttccctcaggccccatacctgagtctgacattcttctaggctagtaaccctattaccacctacacttccctcaacagaaacctgtgctgtcaacaacggaggctgcgacagtaagtgccatgatgcagcgaccggagtccactgcagctgtcctgtgggtttcatgctgcagccagacagaaagacctgcaaaggtgagatctcagagtgaatggggacacggagacctctgccaaagggaggggagagagttcctaggtgaccgaccacgcctcttcaacgccctttaaggctgtcagtttctcccacctcagttcagtgggcacagaagtccagctaccactttgctgccccctggcctggtctcccttgttccctctctcacccctgtccctgtattagggagaagggtctcaaccctggagggacagttgagcctgactctgtgttgttgtgcctgagccatgtgggtggtttaacttcccagcgggtctggaatgatctctggaagcataggtaggagtgcccacaccagggcctggttcggtccgccatgctgtggtgcccaggcttcctccactgaacctggctcatagatgtgcgcagagatggatgagcggtgatcagtgagaagaattggccctgtggggaccttttggcttggctctcattatgacttccattcctatactacccaccccatctcccctcctgccattacctgggatttgggggagatgagaaggaaaagggggaggggagccattctgcaaacgctgactcagcaggtccgtccgtgtcctctggtagggaggagtggggactgggtagtgccgggctccttctttgtgtctcttggcccaagagctgcaggaaggggagggcgggggcagccggtcagccagccgcagtagagaggtttcctgctgggaagggctgttgacaggtaggccaagagtgaaggccctgccccctccccctccacaagtgctgagtagcctgggtcctgtctgccaccagctcgggggaacttgacctcaggaaggaagctgcccacctgctcctttcttagtacccaaagctgccaggctctgagcctctgcagaccatgccagtcccgtccccctcctggcccctcatctctagcagcttctccctctatcttagaagtcctctctacccagcctctttggccagcccctcctctatgaaggctgcccttttacagcatgaccagaggcccccagcctttgtgacaggaaaggacagccctccctacagtcttggggatggctgtcaactggagagtaagggacatggaccagcctggatctcacatggccacctgctcccataagtctagaccgttgctccctgctggcataggtggttcctggacttggcttcaggagagatggtgttagtaatggccagatatcctaaacagggaagacatggagacagaaggtgacagccaagttaaaagggccaagccagggccctccttgattttccttgtctctgtgaggaagagatctgggctcctttgcccctagccttcaatgctgtccttcgtccccagatatagacgagtgccgcttaaacaacgggggctgtgaccacatctgccgcaacacagtgggcagcttcgagtgcagctgcaagaagggctacaagcttctcatcaacgaaaggagctgccagggtgagccggctccggccaagggggcgagtgtcagggatgctgtattccaagcgtctctgtaggcagggctatgccgcagacagacaacggtagtccttccttcttgcaggccagctccatgctgaaatacacagcttggcaaggggtgagcaagctttcaccacaatccaggttttcccaagtgtggcctgctgcaactaggttccacatgcacaggttccagaccctggcaattctggtggtgcacttttaatccctgcacttggaaggcagagacaggcagatctctgggtctgaggccagcctggtgcgttccaggatggccagggctatacagagagaccctgtctcagaaaaacaacaaaagccccaaaccccagacaaagggtacagagggagttgtgcgtgctcagatctggagttaggccaaggtctttcagcatcagagcccatcacctgagcatggaccaggtgccccgagacagactcagtggttcgaatccttgctgttccagatatagatgagtgctccttcgaccgaacctgtgaccacatgtgtgtcaacaccccggggagcttccagtgtctctgtcatcgtggctaccttctatatggtgtcactcactgcgggggtaagccagcaagatcacacctacacctgcctgcttcccagacaccccagccctcgactcttcacactccaaatggctgtgcttgtaatgagaaatccttggatggttcttgtctacatccaacaagataaaatagaaggcaccttccaaagaccagctgggagacaggataccagagagcagcatcctggcagcaagatgcttgagggtttcacgtagcccaggatagctgcacacacacacacacacacacacacacacacacacacacacacacagccagtggtgacctcgaactccaaacctccagccttcacttctcgagggttgcgatggcaggtggcacagactctgcctcctaattctaccttgcattccccatcgctgttcccagagacccaccctctcagtctctagcccaatgagacagtaagagaggaaagttctgaaaccttggtctggttggattggcccctgctcaatggcaactatgactggggatgtagagaagggagagaactttgagctcctcacaggccagagaaccttttactttgtttatgagaatgttaacgtgagacctaccttcctgacaagatttgtaaatgcacagtaatctctataagggtactggcaatctgatctctgactcctcccacagatgtggacgaatgtagcatcaataagggaggctgccgctttggctgcatcaacaccccaggcagctatcagtgtacctgcccagcaggccagggccgccttcactggaacgggaaggattgcacaggtgtgtggcgccctctgctggccagacataacaatgctgtttcaggggaaggtgtgagggggagcctgctgggtttaaaatgtgcaggtctccttgggcatgtaactagtccccctttccgcattaactctctgagggcaggaagacaaggcatgttcatattctcagaccttgcttcccttcctagagccagtgaagtgtcagagcagtcttggagcctcaaaagccatgcttagctgcaatcgctcgggcaagaaggatacttgtgccctgacctgtccctcccgggcccggttcttgccaggtatgtgagagagacggggttctggggagaagggagggcagactggctgttcagcagtgcctctgttcccccggggttcctccaaccattgggggttgagaggtgggtcagagctgtgataagccccttctttcagagtcagagaacggtttcaccgtgagctgtggtaccccgagccctaaagctgctccagcccgagtgatccactctgggaacagcaccgtctccagctcctgccatggtgagcacctgcccagagtcctcctcttctctgcccccacagttctcctcatccctggccgactcaccctctacctcccttgttactctctaactctccagctttgctgccaagctcctcctatcttacccctcctatctgttacccttggctttcctgatcccactctctagctaaaccttactgctgagctcggagccacctcccagagcaggccgtccccagggtccccaggccctggagctgtgctgagcttctcttctccctctagaggctgcagtgctgccagtcaagcagagagcctccttcaagatcaaggatgccaaatgtcgcctgcatctgcgaaacaaaggcaaagccgaggaggccagcaggatcctggggccaggtttggacctccctccctggccccaccaggctctccccacctctcagcccctctgcctagttctgtcatggattcacctgcaccctgggctgtggatagaatggggaagctgttgtaggctaaggccctggaagtccccgtcattccctcctaccgagaagagggttgggggtagggatgtctggggcggatggagaaataggagagtcagaagagagaacttgtcttcagtggaagctacagttcgaggttgacacggcctctgtttccaggtagtgtcccctgctctgactgcctggtcactttcatccaccttaagtgtgactcttctcggaagggcaagggcaggcgggcccggacccccccaggcaaggaggttacccggctcaccctggaattggaagctgaggtcagagcagaagaaacgacaggtgggcctagggacattgttgggtggagggccaaagaggagggcacatagcctggatccaaaagggacaagccaagggaagggggcacctcaactctgggcctgtgtaatggcgagcagcaaactccagggctgcccctgtcggctgccttctgctctgacctctctctcctcattctctgactcgcacaaccatccattaccagctggctgtgggctgccttgcctccgacagcggatggaacggaggctgaaagggtccctgaagatgctcagaaagtccatcaaccaagaccggttcctgctgcgtctggcaggccttgactatgagctagcccacaagccaggcctgggagctggggaccgagcagagctggtggaggtctgccgacctgggcagcaccgagcaggcaccaagtgtggtaagggagcttgccgggaagcaaaggtgtggggagtgggggaggcccaacttggccctggctcagagcagaacaggaccccttgtctcaggtgaagctctcaaaacgtgaggtggcgaagcccctcctgcccacgggcctcctttctctggtcccaggctgaacctcggacactaggcagggccggcagttctcctgcactcagatttgacatccctatctctccaagcagggttctgttcgttccctaatagatctcccatggctggaggagcgggaaggggagtcttaggcctgggtggtgggagatgggggggtggctagcgcggccgactctccctcagtcagctgcccgcagggaacgtattaccacggccagacggagcagtgtgtgccatgcccagcgggcaccttccaggagagggaagggcagctctcctgcgacctttgccctgggagtgatgcccatgggcctcttggagccaccaacgtcaccacgtgtgcaggtgccaggggaacaaacaacgcagagtgggctagggtgggcactgggatgcccgtgggcatggggtttcccaaagggcaggcccaggctccaggccagtctcctagttgatgtcctgtttgtatgcctccgctgttccctaagactgggtgacccagggagtggctcaggaccaaccccatcagagttgggcccttgcttcattgcaggtcagtgcccacctggccaccattcaggagatgggtttaagccctgccagccatgcccccggggcacctatcagcctgaagcagggcgaaccctgtgcttcccctgtggcggaggcctcaccaccaagcatgagggggcagtctccttccaggactgcgacaccaaaggtgagcaggttatttactccccggagcttcctatcctcagctgccacccaccccacacatctccaagcccctccacagacctgagtgttatctgaccatcttccctcaaaagtgaagacccaggtacctaactgtacatgttcttgtttcagagctgccccttgggccagacctggggatagaaagtgactaaacccttcctccctgtccagagtacattgcagattggtagccatttccctccatccccctaagtgagctcctgtatcagtctgacactgctcagggagggcctgcaggaagaggagggtgctgtagccagccactttggaaggtctctcttccctggctttagactatgtctgggaaaggtagggaccctggaagaaacctgggagtctctgatgtctggattctccatgacagatgtgcctgtctatccacggtccagatgcccactttcctaccatcttagcttctgccctcttctctcgcctgcagtccagtgctccccgggccactactataacactagcatccatcgctgtatccgctgtgctgtgggctcctaccagccagatttccgtcagaacttctgcacccgctgcccaggaaatacaagcactgactttgatggctcgaccagtgtggcccagtgcaagagtacgtggctggccaggctgtagggagtggaaagagatcttggagccatgtgcacgggaaaagggggtgggaggtggtaaggcagcggggaagggggccggagtgggtgggtgggcagctgtcagggatgcctgtagcatccttttggatactggaagggcaggaggagggtggacccagcaccccggaagagcaggtggtgatctagcatggttcaccacctatgtttgttctcccccttcaagcccctcagcctgcccaccacggttccccactgactgtccatctctcccttgctctctccaccggggtgtggctgcagatcggcagtgtggcggggagctaggtgagttcactggctacatcgagtctcccaactacccgggcaactacccggccggtgtggagtgcgtctggaacatcaaccccccacccaagcgcaagatcctcatcgtggtccccgagatcttcctgccctccgaggatgagtgtggggacgtcctggtcatgagaaagaactgtgggtgcctgcagagccggctggggggtgggcacgtggaatctggttggggaagagaaagacctgggacggtggagtggggaaccagcagatacacgagaggagccttgggggacagaagctagcacaggacctgtgggacaggttgggtgggcagcagtgagggagccagtcctgaggctgggatgccagtgctgccacctgactaattctaaccctagcctttctgccatcctcgtcccataaaggtcgattttaatgcacctgattgtgcagtagtcggccttgtagaataaacctggggctggcagaagagagggtgtgtggctagctgtgtgtttatgggggctggaggggggagcctctgtcagaatgacctcacagccccactaatctcctgacctgacgcttgccttgccagcctccccatcctctatcaccacttacgagacctgccagacctacgagcggcccattgccttcaccgcccggtccaggaaactctggatcaacttcaagaccagtgaggccaacagcgctcgaggcttccagattccctatgtgacctacgatggtgagcaagggcaggaaagatggggcggtgggtgggtcttgtaagcgtaccaggagagcagagttcccacgctcagcccccaaccctgttgactttacagaggactatgagcagctggtggaagacatagtgcgtgatggccggctgtatgcctcagaaaaccaccaggagatcctaaaggcaagtgagcgttcgctgtggtgcggatggaaatgggtatgcaccgatgtgcaagcaaactgctaagtacagcctgcctttctactcctggctctgtggggcatgcgctttcttcactgccgctttccagatgagagaggtaaagggctttcccatgataggcctgggctctggacccagctcacaaaaccagtgtcagcatactgcgtcacccctgggaggacaggagacatcctctgccttgtccatcacagaggcagagagggtaaactgcacaacgatatacgttgtttacttttttgagacagagtcttaagagtctaggttggctttgaactccgggttcccctgcttcccgctcctaagtgtttggtgggatcacaggcccagaggaacgaacaccaccctgggtctgtggatcccgatttgagtcccgcctggcgtagtgctgctcccctttgatcccagcactcaggaggcataggcgggtggatctccgagtttaaggccagtctggtctatatgtgcagtgctagggtagccaaggagacatactgagacccttccaaatattttttttttaacttcactcttttagttatggctatttgtgtggatatgtgcatgggattgcaaggcggccagaggtgtcagatcctcctggggatggggtagcaggcagttgtgagccatctaatatgggtgctggaacctaaacgcacatcctttgcaagaactatgtgtgctcttaacctctgagccatctctccagccccacgccactgtttgaaatcaaatgtaactgggtgtgctggtgcacatatggcccggctattcaggagctgaagtggaaagatcattcaagcccaagagttaagaaaacagcctgggtgacatgctggactccatcagacagcgaatcaaatgcaccgtgcaactgtatgcacaaagtagtgcagccatgctggagctggggtggcgcacctttgactgcagtacgtgggaggcagaggcagaggcaggaggatctctgggagttctaggtcagcttcaggccagccctagccacacagtgagactctgtcctaaaggaaggactgtatagaacaatcgtcttggttagagtggagttacgaggctgaaagccccaactatcttagaactctgtgtgcaacctagaagccaggagattcattggtagttgggttgggtctctgtgggcacggggcttgtgcatgtgtgtgggtcttgggaattaaactgaggttgttaggcttggtggtaggggcctttcctcatgaatcacctcagtagcccctagagaggagttttaaggaggcggtggagaggtgagctggagagacctacgaggaaaggtttgaaaggagctgtgggatgaccaaggaacagtgcagaccagtgagtgcagcactagtgtgttgtattgaaggacgccaagactactgtcattccacaggggaggaagaggagagggaagcaggacacaagtgacgtacagctagcatgtcacacaagggacctgactcttcctgtgagtgaggacagaaacgggctgatatgtaatcagtggcagagaaaggtttgtcaggcacacagccgtggtgtggctcctggagctaatcactgtcatcattataaaagaataaactttcatcagacattatagcacctgcctgtggtcccagctactggggcagctcaaatgcaaggatcacccaagataacaggaaatgaaaaccagagagcagaaaatgggttccaaacatgaagcagactaactgagcgccccactgtggctgccgtgaggagggaacgctatggtgggccaaggatagaaacacagagatcaatcccaggcccagtggctcacacctctcggactagttattcaaaaggctgaggcaggaggatggtgtgttgtgggtcagttggagctacaaagcaagtccaaagccagtttgagcaacttagagagactctatctcaagtaacaagagtgctcaataatagaattgctattgcagagtaatagggtataatagaattcgattatagcaataataaaattgctgacactggagtggcctaggtgctggagagttggctcagtagttaagaacatctgttacttcttgcagaggaactgggctcagttcccagtgcccacacagtgactcataaccatccataactccagttccagggaatctaacacaattctgacctcctcaagcaccaggcatgcatgtggtgcacacacatacacacaggtgaaattcacataaaataagtaaatctaggaggaaaacaaaagaagaatactaggctattgtgtctgagggcctagtatcacaaaggaaaggaatagaccagccattggaatagcccaggtgagagtttatggtggtgtcactccgcgtggcagctgtgggctggcaagctgctcagacagatgctgggcatacgctgaaggcagagtcaacagctggctgtagctgagacactacggagtcaaggatgccccacaggcccagcctgagcagcggaggcctagacctgtggctaactgagctttggggttccaaaggagcagggggaggccctctgagcatgctcagtgtgagctgctgttagacaggaagaggggctgctgagtattcctctcccccacatgccactgaagctgacaactgccacctgccatctcctgcaggacaagaagcttatcaaggccttctttgaggtcctggcccaccctcaaaactacttcaagtacacagagaaacacaaggagatgctgccaaaatccttcatcaagctactgcgctccaaagtctccagcttcctgaggccttacaaatagtgcctgtgggcccgagacccagttcagagctcccacctccctggccctcagagttggcaccccaacctcagacaagaaactgtctctcttgaaggagagatatcaccacaccaggcgctctccctttcggcctttctagttaccttgtcttcgttctgtctctctcctggaagtcattcagtgcgtctctgttccccccagaggtgaaggaatagacaccctctattcctctgccgttatagcatggtgccttgctagccaggagccaaaacaccccctccacagcccccgtgctccccagagtgggtcttcacagcccagagtcctgccaaagaagccttggacatagcagctttgtgccagcatcaggctgctggggcacagagtttaagcccggggtgcccacacagttggcgttctcatctgtagagcttgctctcatctggccggggctgactccatagggtttacaagtgatccataccaatgggatagcaaacccctgccgggtaagggcgaggagcaggcaggggccctggacatataaagctctcagatagctctgcaggacagaaagcgggtttttaaaacattgcccaaaacagaaagaaagaaaatgtgtcacctaaaggaacttcctacagaacaagtggaagccagcctcaaacactaacccttttcttgccagtaccccccgcccccggccgtgccctcaccccacctaagggctccctgggggaggcctacccaccccctggtaagcgctgtccttaaagaagctgggctgttgactttccaagcctagaccttgctccacgggtgttttcccttgtagccccaggtggcttgtgggttccaccaaagaggaccccactctgcagccagcctggagctacctacctctagcctcgggctgtgggcagcaggaggaacaagtgtgagtgcccttggcaagccgcctgtccaccctctccacatctgagaagtgcaatcattttgagtctttctatgtcgtctagagggaggggggattgtttttttgtttgtttctttttcctctcagaataaccctatttatagctgcctaggagagaggggtgtgctgaggctggagaaacagcagtctgtctgtcgggagccttaagtgccggagcggctcatatgtctcagtcctccctgaggccacacagaacttcagagccctcagcagcgcagagctagggctatccctcagaggtgccccaagcacaggagactagctctggtaacttgatgaagcaggaggaggaggcttcctgactgagctgatcctgcctgccttgtgtctctctgtggattcatggtaacagaagcagatggacttggtcagaatcttgtgcgagtagggacaacctgtctttccctatcttcatgctctcccctgacacggcatgggaggggatcgggataaactctatggatggccagcgcaggctcccaagacagccagagagggctggagcagcctggaattggacagttctccgtgtatgaagcgggggaaggacaggaaccagacgtgtgcctgagacctgccacctgcctcttggagctgacttcaagcctgattcaactactgtctttcaaaagaagaatggtgtctgtgcctgagcccgggctctgcatatgctccacccttaacctagatgctgcctgtaaagtctccaattgttccttcttgttccccgaggcttagtcctggacatccaccaatgactcctcaggtccaactctaggtaactgccaagagattcaactatcaaatagtctgatccccacacacaccagccagcagcaggcgaagctcgcttcctggatgccttagccaacacggtgggggtgagggtcgggtggggtcagagagctattgcaaagctgttgaatggtttcatgcaagaggggcgaatgggcatttagtgggtccccagaagtgccatagaacagcctgagtcacgagtcctttctccctaacattttgccagctcctggaaagccacaaagtgagagtgcctcccaatgtatgcctttagggcgtggcttctccgcactcccccaccccaccccccaacccccatctcaccatacatacacggacacttcctctaatcatttgttctatggctgatggggcagcacatgagatctatcgtacggagagagtaggccactagacttagctgatatcaagatggatggaggagatcaagcaagggctttctactgccaaccaagttggcagcaaggaatccaggcagagctgttacgaacttacaggggatattggccctgagcgcctcactctgggagctgagtgggctgaaggaggagttaagaactcagggactttctaggactgcacaggttagacaaaagaggtttccaggagaaggggggatgggaagatggtgtgaacaggaacccttcgtgagctgacctagaagcttctctgtgggctatggtgcttacgaggtcatgtaaccccggcgcctcatccatcccagtgcaagacctgctgtgaactgagtcccagcgtgggaagccatttccacatgtgctccaagcacggagtgacaaatgtcaagcaggccctgatatcctcagcagcacctcggtgcctctttagcctctgcctctatttgtgtcattgacccagccagtccccaagcctgaggtaattaggagaaagccgaccagagcctggacgttagctgcccaccctgtgccttcagtgatccttcgaggactgccactggcctcactacggtcatttccatgtggaggtgccgatggagaagatggtacagtctgggctctggctcctaggagtctctgtgaatctgcgaagtgttctccatgagcgcgcctgaggtgacttaaatggattaggaagtcctatctcagtgtgtaagagaaagcgacagcacattgaagggcctgtatctgctgctgagctccagagcaggggagcagaggccaaatgtaactgaccccaagcaggacatggtgccccgcctggttcctttcctaagcagactccacgaaggaaccctttctgtcggccctgtctcaaagctggtgcactctgtctttccgctattattcggactgagaacccgaaggaccagaggccccgttctgcgatcagcttaccaagactaaacaatggcagcagtagtttggacaagctcaaaatcttgttctatgtgagtcggactttcagagagtaattatcatgtggacggctttttttttctttttaacgcagaagaatatcttaaaatactatatttatatctgccttccactgcctctcatacagcaagcatctcagttgacaataggcagcagcaatgtggtacacagagtattttgcacttggggaaaaatatgtatctgaaaacttgtaaaaaggaatgtttggattttgtattgtcttttttatattattaaaatactaaatgaaactccgaggtctagcaagcatcctttcctctacctcaaaggcttgtcctatagctgggggcccgggggggggatcttaaacactcaaaggtctcttcttctcactgccggacaggcctggctcccccctcccacagctcagcttattcctaatgattttaatatctggaaattcatgtctctgtctacgtttaaaagcaacgttggagacttcccctcgctgagcatgacagcttaggtctttaatcccagtattaaagaagcagaagcaggagtttccagacctgcgagggaggcagaaccagcaccaaggtcaccgcaccccagcaatggagagctgtcatccgacatccccccctctgatctttactcgtagctcagcagcagagcgccatgcctagcatgcccgggcccttgcatctcattcctggtaccaagagaataaaattctactccacaacagcttcctcaccaatctttcggacctggaatgttttagaaccgttgctttggctgggtatagtgactcacgcctttgatcctagcacttggggagggagaggcaggcagatgtgtgagtttgaggccagcctggtctacctagactaagatgcaggccagccaaggccacgtggtgggatgacaacttttatctcttccttcagacaaatggtttctgtgtaatggagaggaaacgaaccgaataccatctgcaaggaagagctatctgcccatatggtaaagggtggtggcgctgagcagacatccaggtcactcggaattctagtattttcaactcaccagaaaactaaaagtgatcctgaactttttcattgagtatgtgtgtgcatttgtgagtgtatataagcaagcactgtctgtgtgtgtgtgtgtgtaagcatgctaccatgtgtctttggagttcagaggacaactgggggaaacaggttctcttttcccaccatatgggttccaaggatcaaactcttgccagccctgatggtgaactcttgaccctcctggtttcacctccccagtgcaggggattacagttgtacaccaccgtgtctggctttcttgctgtatttctaaccaataatccgtgctataaaaccctggaaagatcccatgtgtgtcgtgctaggatggcagagctggctctaactgggtatatactagggcaccaggtggaaattccagtaccacactgggacctcggggttaacatgcccgtgccaaggctcctcccccttcatcttcttatttttaattggaagcttattttctctcaatttctgaaaatatcctgaaccacaattcctccctgcttggaagagagataataaaaagaacttttaaagttaggtgtcaggtgtaaagatgaggcaggaggatcacaagttcaaggccaccttgggatccacagtttgagtccaaaaaaaggacaaaactatggaaaaacagagaagaaagggggcacttggttttgttcctcacactgctaccctatcaaggggacctgttggttttggggagctgatggaggaatgaatgaacgcccaagaacctgagaagactctcggggcgttgtccctcaggggtcgaccatcagagtgtcatttctcagggaaggcagtagaaggaagcaagtgttgtcagggaaccttccttcagagagaatcatccctcaggaagatgagtcgagcagaggggaacgtcagggcccttcctcaggggacaggatgggtgcaccatccctcataaacactcacgttccccagggcatatgggaaaagccagtactgcagggagaattgtcccgcaggaaggactgtcagggctccatccttcataatgctgtccccccacccccacccctcgggcatcttcccacaaagtgcaggaaggattgtccctcggggtgcagtccatgcagaaggaccatctctcacggagactgtccacagggaggaccgtccctaagtccctcagggtgctgagccccagttcaccttctgacagagcgggagagaagcgtcccttagggtgaagtcccagggggaggaccatccagcagagatgactgtcgggacgccatcccttggggcgccgttgcacagggcgctgggaggactgtccctcggagtcccatcccctccaggcgtctggtcaccgtcctctgcaggaaccacctagagatacctgcaatggcttcctcccgagcagcccaccgccgctcgattttttcccccgttgctatggcgaccgcggcttccacccggcgtcgtgacgtcatcacgccctccccgggcgcccgggctggcgaggccgcgtcacccggcggccagcggagagaagagcgaggcggagctccgaggctcgcctgaggagactcggcggcctgggctccggggcccgggaaccgggataagcaggccggccgccgcggcggaggggggcgggctggagcgtggccccgcgctggtcatccgggttccggggcccggcggaggccgcgccgggagcnnnnnnnnnnnnnnnnnnnnnnnnnnnnnnnnnnnnnnnnnnnnnnnnnnnnnnnnnnnnnnnnnnnnnnnnnnnnnnnnnnnnnnnnnnnnnnnnnnnnnnnnnnnnnnnnnnnnnnnnnnnnnnnnnnnnnnnnnnnnnnnnnnnnnnnnnnnnnnnnnnnnnnnnnnnnnnnnnnnnnnnnnnnnnnnnnnnnnnnnnnnnnnnnnnnnnnnnnnnnnnnnnnnnnnnnnnnnnnnnnnnnnnnnnnnnnnnnnnnnnnnnnnnnnnnnnnnnnnnnnnnnnnnnnnnnnnnnnnnnnnnnnnnnnnnnnnnnnnnnnnnnnnnnnnnnnnnnnnnnnnnnnnnnnnnnnnnnnnnnnnnnnnnnnnnnnnnnnnnnnnnnnnnnnnnnnnnnnnnnnnnnnnnnnnnnnnnnnnnnnnnnnnnnnnnnnnnnnnnnnnnnnnnnnnnnnnnnnnnnnnnnnnnnnnnnnnnnnnnnnnnnnnnnnnnnnnnnnnnnnnnnnnnnnnnnnnnnnnnnnnnnnnnnnnnnnnnnnnnnnccctccatcccgccctgagactcctcccccaggactcccaaaccccgccctcctcctcctccttgaccccatacacacactcctgacccccagacctcacaaggcgacccccaattcattgagtgctaaccccagccctgcttctggaccctccagtctcagtgctgatacaatcattacatggcttccaagaggcccgtagtccctagtgaccccctagactaccctctgtgggcaccccttagtcctctcctggcttctgcaaaccagactcgggctgtttcccacccactcatccacataactcgtgatcttcgccccgtaacaccatgatcatctcaccctcctgacatccctctttaacccccccccccgcccccagcctccagtgtcaatcagcacatacataacttatgcccactgccatgccaccgttgtggtgatcaagagtaaatggaaatgaagtatcatttgaggcaggaaaggattctagattgagtgtgtggttcaagttcaaattctatcatgttgagctttggaaaccttggtggaggtcctttccttacggtggacttgagtttctgatcagaactgtgatgagattgagtttggtgattccccaatgtttctttctattaaaattctgcaattcttagtcaagacaaaaatagcgaacttttttctacgctgcctcagaaatgtagtccttgtaacctcaccctcccacccccactcccaacctgggtctactggctttaccgaacagtatttcttcattcctgtgattgtctacactctgccccctcaattggactctatcagtttgtaaagccgtgcagcacagagcttcccactgagttgacatcatgagcttggcccttcagctggggaacttttggcaaagcatttaaagcctgaggtaacaggtgcagaacattcaggacccttctgcctcacaggaaacctttacctttatggtagaacagttgtttttagtgaaggtctaactactgggtgctggagatgccacagacaccaagcatatggcccacgccagtcactactgctgccatcttggaatccctgtccccatctctgatgagtgccttacctctcacttggacctttttcacagccccttagtaatgatccccctgccccagaaactactgtatggcaaactttatttatatagattaactagacctctcacaggccagacctattagctctttctgtcaccactccctccctgccttttcctgagagttgctttaaataaaggaatctggaattgatacatttgaactgaccatgctagaaaacccacccactcggttgtctctcatatcctgacttcctggttttccaaattctcctcaggcccttgctccttgctttccaggaattcttaaattcaaccttcgcccatctaatcaccctcaagggcttcttctccttgtcccatgactaagtaacttttctcaccctcttcatgacccttgacctcttatccccccaagaccccttgcaccttatgtggaaaggacaccacacccttctttaaaacccctatctgaggctcctgtaacaaagggcagattaacaggcgaaaagcatcgcagtttatttagtttaacttactcgatgcgaagctttcagttaaggaggtgaagacctgaagattagacccatgcatttttattctaggctcggtgaagatggaaaatataagaccaagaaaatgcagtaaatgggggagggggtgtaacatatcaagccccaaatgttcaggttcttgcccatgacccacatccttaaaagggtgctttttttccctcttatgttgggtacgggaaggcacagaggatcttaggacctgcttcagaggagaagataagagagaccttgcttctcacgtcctcagattgccagcgtttctgaaccaagttaaccctatcggctgtcctgctaatccagcgctgtaccactaaacggtatccctgtgtctgcccttggcctcggaggctcccactcagtgatgtccctgacatcagtcacccttaatccgttcctggtgcatatgcctggggaatctatgtgtccccgtgctgtgggaaacctgctttcagccagcagcagtcttgctcctcccctaacttttgccatcctcagccacatcccgatctctgaaacctctaattagcgctgctagtgaccttaccatttgcctagcttctgagaaatgagtcgcttctgccccagcacggtcccacccttcatgcacctgcacactagcccattcagggatcccacctttgtgcccacgcccctgctcagatcctgcgtctcccccaccccactccctgcttccttttcatcaagtattccttacccctcttcctcacagggcccctgcttcctcctccctgttcctgtcagtaagtgtccttacctcacggatcttgacaaacttgactgtactgtgcctctgcttcctttccagttctgctcttgaaatgtccatggcttttggattctgagacccctactttcagttgtgtaggagaggcaccccaaacttctggtttgtcccaagaaccgtgctccaggaacgtctgatggattcagatgctagagacccaggagtctctctgtctttaggtagcaaggagagagcccttggaaggcctttaggactgatgtggctgtgtctcccgaacacactcttgttcccagcctctttctgaggccactgcagatcctctgaggctagagtgtgctgtcacacccccactggcactgaattagtcctattgttttctgagcccttggctcccctcccactggaagctggaatgtgaatagcagagaaggtgccccacagtctgttctgtaggtcacccgaatcccagtgttggctgtagagccataatcgttgaaggtgaaatggcaggatcctggggtggatttcagaaggatcgtgcccacttaggttgcttttatgtccttaggacataatctgccttatggctctcctccctgtgacttccttgagagcagagggcaaatccctttatcatctgacatcttaatgccccccccccatctttggacagtagtcagccattgctggctacactgagtggaccctgaattccttgtctttagaaggcagtcagtcagtcattgcttcctgcactgaggaaactgaatttctgcgtcactgcaaggattagaacacattctgtggccacttcctcctcgcacagggccctctaagcatgctagcaggtcagacatcgaggaacttggctgcctctgtttagtcatctttctggtgaggcaatggatggttacgctgggcttctcgggttgtttgcttttgggtagtaagttgaggagacactagacttcaggccagatggctcagctggtaaggagcctgatgacccaagtttgattcccagggcccgtatggtaggagagaactgactccaaggtgtcctctgatggccacacggatggcacggcatgcctgtgggtgcgagtgcgcacacacagaaaaatgaagagttctaagaagagggtgttaggacccagtggaaacagccagggactggtttctatagacttgttttggaaaaaaaaaaaaaatggctatgtgaactgcttaggtgagagcagaggaccagtcgctagctggctgttggaaattgttgggcctgcgaaagttttaatactactatgtcagcttttctgtgtttcagcggtccacatcaggagttgggggttggggaccagatagatgattacgtaaagtttagccccgttcctcagaaaacacctccagtcaaatgagcttctatttgaatcagagctgacctaggctgagcaggctgcttggccctgaccggtatctgacctcttctgtttgtgagacctcagaaggctaaacttaaaccgcactctgcagacgtctctgccgggagtttgggacttgcactatcctagcaactagaacctgttgccctggtaccaccccgctccccagctccggtgctttcttgtgggaaatagctgactggatctggagaaaggtgaggcagtgggagggtactcccctccgccgccccccacccccaggttagagaagctaggctcagcaaggatttctcctgacctgttgggagatcctgaaggcatgggggttcattcagtcctccatccatccatccatccatccaataagtccttggttgatgtctgctatatgcaaagcactcttttaggttctgggaatagagaactgtcaaaaaaaaaacaaaaaacaaaaaaccccaagacaattgaaacagtgaagtagagtagagagggcagccaggattattgttttagtcagagtggcaaggaacttgttactgacaaggtgacatttgaacagagaagatgaagctggtgtgtgtatctaaggaaggttatttctgtaacagtagacaagcaagctcaaagggcctgaggcagaaataagccaaaatcatgaggagccaggcagtacagctgtggtacccaaatggctggcagcctgacaagggaaagagcaggagccgctgaggtggggagtagattgcttcttacaggccaccagccactcgaggagtccaggcagatacgtggcaggatttgactattgttctgaaagtccctctgactgctgtgttgtgactcagttgcgttggggcagagtgaaaagatggggtgctcctgcagtgggaagtgttggggtgctcctgcaatgggaactgacagaaggctcatttaataggaactgttgggggtcctcttgcagtggtccagaaaaggaaagttgatggcttggatccacagtaaaggagtgagagagaaactgttggaacgtggccgtactttgaaagaggcacctagaggtggatgggttgaaagtgtcaggtaaagacactgggaacagctcccaattcccattactgaaggagggagtttggaaagtcagattgtgagaaggagaggctaggacttcaccccagccctaccccccagagtcagagtctcctgcagcccgggttgggctctaacttactgtgtagcaggggtgacctgagcttttgactctataatcttacctgctgaggaatgggattacagacatgcgccaccaagcccatatccccagccccagaattcacttcttttcttttaatattggaattcacttttttgtttggttttatgtttgatttggtttgggttttggggtttttttcggagtcagagtttgctctgtgtagctctggctgtcctagaataagcttgtcacttgtgagacccttttagacagcaaaatagaaccattgataagcagctcgatatatagatctgtggggccctcgtactgcctgctctcccagtgccagactgcatgtagaaggaaaagctggagggttaggagtctgcctggactctgccagcagggagccgtgtgatcccacagctcctggcttcccttctaaacggctaccttaggctagaagggagctgtcacctcagcccctcttgtgagcattggtgaatttagaatgaggaaggcagcaaggcacctctgaggctgtgattctgcccaggcagtgtgtcggtgatagatttcctcctttcttcctccattcgtacagtagtaaccaggagcaccccccacgtgtggcctgagggagactgagcctgccctccgggagcacggcagtcggcttcatactaccaggcacaagggcctccacatgatgcactggtgtgcaccagggctccagcaccgtggagctggaacctcaccggtcctcagagcttgctgctaactagtccagccaaccagtcagtttcagagactgtctcagaaagtaaggtacagagtgaccgaggaaaatctcgtgtgagcctccagcctctgtgtacatacacactcaatacacacacgctcacacttgcacaaacatacacttatacattcacacacagaagcacacatactcacataaacatacgttctaaaacataaactattccattaaagggatgtgccatagtttgcctgttgaggacatcttggtttccatgagtttgggctttgaatgaatatgtctgtggaggtattcccagttcacgatgaaaaggagtgatcactggatcacatgagaaggttgtgccagcaccaacgtaagtggctgccaggctgctttccacagtgactgtcccctctcacactgccgtgacaggagacaagacttcatgtcagccttcaccctggccctgtaggatgttgccagtgttctggaggcacctttctgacagcctttcagggctagcatgtttccagccacctcttctccattacggtgtctctttaaaccttcgctttctttattgtcttactgagatagttctcactctgtagccttggcttatgtgtaaccatgctggcccctaagttctgtggatcctcctgtatctgtctgccttgtaggtttacattgtgagctccaacacagtttgtctctgtggttttagtatattttgtagatagttttttgattctccatctattggttttcctgacaagctcttttgtccattggctttttttttccttctgaaagccaaaagtactttctcttcctcattaagattttgcatattgttccactttgatatcttaactaaatggtgttaatggtgtgtccccacctctcctgatgctgatgggatatgtcatttttcgcaagaacggtacttgtcaagccgtggtgaccacagctggatgcctttatcactgctaatattttcttcctttcttccttccttccttccttccttccttccttcctccctcccttctttcttcttcctccccccatcccacttcctgtcctggcacacatgctcatcaagtgttctaccacgcgttgcccagcccagcagcacacatcttcactccgctgcctggtcgcacatccaggctgaagcatccctttccttcttaaaccctgaggtgcacaccctggaagcacatgctgctgtccccccaggnnnnnnnnnnnnnnnnnnnncctccctccctcccttcctttctttcctttgtttgtttggttttgggtttttgtggcagggttttgttgtcgctctctgctggcctggcatttgtggtctagtccaggctgccttgcgatcacagagacacacctgcatctgccctctgagtgccagaataaaagtaacgctcagagggtggctacgccacttgtgccatttctctatttcagtggggaaaaaatgaaataaaaataaaggtacactctgctaatttgcctattagtccaaagttagtataatcttccaacatgccttgattctggacattcctgaactgaaagtgaggatgagagccacctgtgaccaccatcctggatggtcacaagtggaggtgttaaatgcaatgtgtactcaagattccattttagttgaaatagtttccgttccataatgacagacctgcatcccctgtgatttggaactggaagtaatccactctgcctggccacttgccttgttgtgacactcacagcagtatataaccatgcaagcatgagctgggcttttacagccagcctgcctttggcagggatgtgtgtgtgatgccctgagcagcgcaattttctgttactaatttcctgttttctcttcatggtttagaaaaccacagaactaggcttgggtcttgatgtgcaccgaagtccttttctgtaacagcagatacagaatcagtttgttaccacagctctcccagatctgtatctgatttgtttgccccttgtccccatcagcctttgtccctcccagactaatgtttgccatccacgagaggcttggatgtggaccagatcagagctgaacctttgctaagtgtggaacacaagtgcgcatgctcccttcagactcctgcctcttgcagatagtttacatagagcaggctgtgtggagggacctagagacaatccgctcatccgcaaagcctttcagaagcctgcatcccctggtgccttggcaataggagatgcatctacacaccacagcaagaggattttctgcattcagtcaataggttgagttggttttaaaaagtggagcaagctgctggggctgctctaaaaagtcaggagtggttgcttgaggtctggttgtcatcactcttgtctccctctcttcccaactgcccctcaccgtacccaggagctgataaaccacatacctcctccgtccatcttgacgctgaaatgcccactgtgggcaggaactgcccagacagcctctgaggtctgcccgtcgctcgtgagtttagtgctagcataagaggattcagagtaagccatcatttaaagaaggggaagggaggccaagcttataggctaaaggcagatggctgccagtcaagactctcaccccttagacttgatgcaccaagactcagtgcacaaacctgcaatctcagcttcagaaggcaggaggatcacaagttcaagaccatgctaagcaacctagttagaccatatctcaagcaaaagggaggaaggaaagaggaagggagaatgaggaccatggctcgtgcctggggggacagcagcatgtgcttccagggtgtgcacctcagggtttaagaaggaaagggatgcttcagcctggatgtgcgaccaggcagcggagtgaagatgtgtgctgctgggctgggcaacgcgtggtagaacacttgatgagcatgtgtgccaggacaggaagtgggatggggggaggaaggagaaagaagagatggaggaaggaaggaagggaggaaggaaggaagggaggaaggaagaaaagaaggataggtttggttttatttgggtctaagaagggacattttgggaaatgtggctcccagcttctccagccccaattccccttgtcgtggcagatctagaaggctggggtgaggttacagagctttgagtgctaacagtgctctatactttaccagtaggaagtgtggaggcccacacctaggccagccagcccacttcagcagcagctggcagctttgggaccttgggccgatcattttccctcctagcttcagtagcctcatctgcgaggggttgtgtgcgcctcctcataaagcagtgtccagcacatgttaagggtgtgtccgtcatcgctgtgttagcttgagcagtgggaaggactgtaaggccatcggggccaacgggcaaggaagcaggcagggaggcagaaacctcttctgcagagagccatccagttccttcatgaggacctgaactaagatggtgccatactccccttccagagcctccatgctggagtcctctccatgtgcctgtcctgtcctgagtggcagcatgtgcgacctcatctagcccttacaataacctaggaagcagtgtctctgctgtctcagctgcagcatctgaggctcaagagaggctcatccgtttgctatccgactgcagagccctgtagagagcagacactctaaattcaaccacctgtcactgtgggagctaccaacccagccatggaagctagaggccattctgtctctccagcctgtggtctgttttgtatttaggccaagtcttatatgtgtccttatttctcacgtgttgtggttacagtaaaacgggttaccaaaaaacaaaacaacaacaacaaaaacccaaaaccaaaaaaactctctccctgattaagagaatgggagttaagagttgtagagcagtccagaaccagtcaggaccagagatcccagccaagtgggtcgctcctagacgagatggttcaggtctgagttcccagaagctgttcccgtttgattgatttctctatacctctctgatagccttagacaacgtctttaaaaatgtagacaaggggctggagagatggctcggtggttaagagcagagactgctcttccagaggtcctgagttcaattcccagcaaccacatggtggctccacgtcatctgtaatgggatctgatgcatccatctggtgtgtctgaagacagcaacagtgtactcatataaataataaatagataaaactttaaaaattaaaaattaaaaaaatatatatagacaggcctgtgttccacaagagtactttttagtggtctcagggtttttaaacccctaggagaccctctgcacttggcaccatcgtagagaccttgggtgctcattctttttgtttgtttgtttgtttgtttttttgttttttcgagacagggtttctctgtgtagccctggctatcctggaactcactttgtagacctggcctcgaactcagaaatctgcctgcctctgcctcctgagtgctaggattaaaggcatgcaccaccatgcccggcattgagtgctcattcttgatcagatggtgtgggttcaaatcctcctctcacacttagtagctctgcaaccttgagaaagttatttgatgtcctaggactaaactgtgaaatagagaaaataggaccaacaaggccgggccatagataaaggcatttgctgctgaccctgaccacctgagtttggtccccagaaccaacatgacagaaggattgaaccagctccctcaggttgtgctctgacttccacgtgcacattcactcacagagaaaatgtttttaaaccagggaacataacagtaccagagcgtagagatgtgagcatatccacacccctgcgttcccattgtgtgtgtgtagagatgtgagcatgtccacacccctgtgttgtcattgtgtgtgtgtagagatgtgagcaggtccatacccctgcattcccattgtgtgtgtgtgttgctggctattgctgatgccgctccctgaagcagagcacattcgggtaaatgttaacagactaagtgagtgagttagttattctagtgaagatgccaagcttagggtggagcgacacagccaacgtgtcccaggtggactgtagttacactgcagcactgatctctcaaccctcgaggcacaaagctccagcttgtcacttctggcctcaagcaacatgtgcccagtgacacacaaacatcctccaggtatatcagtgtgaaggcagagcatcatctggggtttcaaggttaaagtaggcagtctgggagagtcttaattttaatgatcaagatggctgtgtgggtaaagacacctgtaaccaagactaacaacctgatacatgggatccacacagtgaaaggcaggaaccaatccctgcaagccgccaataaggttaagaaaggaaaacgcctctttagagaatcttaaggagaccaaaagcaggggcagagggctcctgacaggtcacatatgagggtctacaatggaccatgttctgtgctgctaggacatagcaagtcatgtctgtgtacagcctacagcacacagggctggtgcagccaccccaagccagaagagccacgtagaacccaggttacactgataaatggtgaaggacgtgagccccaggaagaggaagggccccagcttctgggagtaagcttcatatttgtgctggggtttttttttgggggggggtgtcatcctcacagcttgttagaaaataaatcagaaacagggaagacttggtctgaggacacggttaggtggctctgagtgagaagtagcctgcctttttatgagcagaggactcagggtggatggaggtgccatccccgagatggaaatgttgtgaattctgttagggacctgctgtttgttccttgaggatggtcaatagtgccggtggatggatgggtctgagcacaggatagaccatggagtaagcacagacaaccaggcagagagcctgcctgcctttgacgggaagtgagttcagtcagtgatggctcagtcagtcagtaacggctcggtcagcggatttttacttcacaagcatcttgaccaccatgcttctgtgcccaccattttgaattaactctgtgtgtgtgtgtgtgtgtgtgagagagagagagagagagagagagagagagagagagagagtcacactttccataggaaccagcttaattctctgaagcagtgtctgtgtgctcctggctggcctcgggccttgttgatcacttgcaacaggagggagctgtgaggcttgctcttgtttttgttttgttttgttttgtttttgatgtgactttgtccattttctcagattggtgacccagaaggaaatctgtgacctcagtggtgaccagaagccaacttcatgtctgaaggcacaagtggcagtttgtcatggaaagcctggggctgcaaacggtgaggctcagtgatgggacaacagcctacgtccagcaggctgtcaaaggtgagtgttctggggaccttggaaccctgcccgtcttccctgctcacctgcctgctggcccccacctggtgcagctttctgtgcctgcgagggacttctgtgtgcacctgacagaaaggggactcgttagaattagggaccagcatgtgcgagcctaggccgcctactttcagacacccctgttccagcttagggtgcttcctggacagaggcagtccactgtcttgactgaagtggatgtaagtgctgggggtgccgttctgagtctctgccctgtacaagacactctaggcacagcaggggccccacaaatacaatttatgcctcagtgtctgacaccagtgggcaccaaataaacacactgggttcacggagagacttgaatctcagataagtaatggttcttcaggagtgtaggcctctcctcagacctgcacggggcatgagtttataaccatagcattgaagactaaaacaactctccaggcatgtaagtacacgctgggggcacggaggctctgtcagaggacctgagttgggttcccagcacctatgatgggctgctccagggaatccaacaccctcgtctgatctctgaggtaactcacacacacatagcatgcatacacacacacaccatgagcatatagacctaaataaaagtagaaatgttaaaaagctgtttatgaacagacaaggcctcctctgcgcagacacttaggagtagacacgtgttgggttttggagacctagggtttggaatgttcgcatagatgtgagcctgcacttccctaacctgctgggagttcacgcactgcagacttaggtttcagatgagggatagtcacactgagagtttgtcatttgtgggaaacgcagacttaacagccatggagagcccaagcctgaagtgctgttgggcatgggtacctctgggcagtgctcctgcccaccgctctcagacgtgccccgtgtggtcttggcctccgtggacagaaacgctgcctcctccttccttttccagatcctgggagcagcgctatcctcataaccacattgctgcctccttcagttcaacacacctaagaaaatgtccaggcctaggtgtgcggatgcctcgtttagtgctttgtcatttaagttatgtgggctttctttgttttctttgcttttgttgatgtttatttgagacagggtttctctgtgtagccctggctgtcctggaactcactctgtagaccaggctggcctcgaactcagagatctacctgcctctgcctcccgagagctgggattccatgcctggccaaaaatttgtttcttgacaatgaagtgagatagcccttgatgtcgtcaacaagctcttgaggtggcttcggaaggcctgtcatagtctgtctaggatcgttctcctgagaatgtgttttctctagaatacttctgaagcccgtagctctctgtccctgcattgtctgtcctgtccctacacctgtcatggtgcagtctgggagagaatttgggatttctaggtggggctgtgctttctccttagaccctctcacttcccttgcttcagctttccacagagaattactagttaatgaattaaagcggttggcagccaaccctcaacctgtagtctctgccttcgggagactaaggcaggtctgtctcaaaagaacagaatagcaaaaaggcgagctgtctagccccagaccactcttcttaaatcttttcttttaaagttatgtctttgcctcttccacctctctgtttctctgtttgtgactatatacattcacacatacacacacacatatatatataggtatatatgtatatgtgtgtatgtgtatgtatatatatatatgaatgtgtgtgtatatatatatatatatattacatttcttttattttttatgaatacactgtcactgtctaaagacatacaggaagagagcatcagatttcattacaaatggttgtgagccaccatgtaccatgtgggtgctgggaattgaactcaggacctttggaagaacagtgagtgctcttaaccactgagctgcctctccagcccttttgtttctctttctcccatcattcttctcaggtctgtttcttacctcccactgggttgcaatatgtgtatccatgtgtgtgcacttaatcacactcaaataaatgtagttgtaaatcttttttttaaaaatcttacatcagaataattacttttacttttaaactcagccttactcaaaatcttaggacatgcatgatattctttgctagaatgtaccattcgtggtcctctggtctgtccccactggagtcctgtcccctctgaaggtgcaggagcctaatctcaactgcccacttgcacttggcatcctggtcttttgaactcacacaggaaactgcttattaagttccgcttacagcagcttaagccttctctggcttgctgctccatacttttccaaagtccttccacagaaagttcccaagacctaagatccacactgccaggtcacagccacatccctcttctctggcaccagttcctttgccttgctgggacaacataaataccttacgtgaccgatgtgaaagagagagggtttactttggctcatgtctttaaggtgttcagtcctagtcatttggccccatgtacttgagcagaacatcactgtagacgggagcctctgggctgtaggagagagctgttcacctcacggctgacaggaaggaggaaatgaagcagaaacgggccaaggggaaacacacacacacacacaccccacatgacctccaaggaccaacttcttccagctaaacccacctcctatagtttctagaactttctaaagcaaaagggcatttgccattcaaggttatgcataactatggagctgaggagtcacaactgtgcagagcaccagaacccatggagaatccctctaggggtgagtttggggattcccctgatgggacaatgtcagcagatagttgagtcagaagaggccagctgacgtttctccttattgcagggctcagttcctgagctgaagaaagagtgaacacatctcctgcattgacttgtcagtctccctgtctttctttctgtcctcactcccattctctcccaagagaacagcctgagcagggagcccttgagtctgatcccaagagcccactcaggtgtggtggctcattcacacttaggtgtgaaggcaggaagacaggaggaattcagggctatcctcagctctatagtgaggataaagccaacctgggcaacttgagacccccatctaagagaagagaaaagagtccaggacacagtggcctatacctgtggtccccccaaagcacaagagacgtaggcaggaggattgcaatatgaggccagcctgagccacatatcaagaccctgcataaaataatcaaggtttagggatacacgttcctggctgaagcccttacctgacatgcaaaggctaaaggttcagtcccagccctggaaaggaagaaaaagcctggcaggatgcacactcctgtaacctcagcatgtagaaggcagaaacaggagcttacaatgactttgaagtcttcatttgtctggttagcaaactccaggccagcatggactacagagcaagatcctgtctcaaggaaagctttggtgggtggggtgggagtggggcttgaggttgcatagatcaagtaaggaaacatgctcacatgacagtaaggtgagtcatagaccccacccccacagtagccacactcagcctaggcagatagctcactcatggagcatgaaagtgtgagggcccgagttcaaccttcagcacccacatcaaaagctgggtgaagtggcacgtgcttctaatcccccagccaggaggatccctggggactctctggcccgccagcctatggaacctgggagctcctggccagccaatgagagatgctgtctcaaaggcaagggaaggcttattgaggaacatcacccaaggttgacctctggcctatgcacatgctcatgtgcacacacgtgcacacacgtgcacactcaatgtgcacacaaacgccacacacatatacacacacatgtacacgcacaggcacatgaatccacacctctctatcccttcacttccatttctttcgtttgttttttgttgctgtttttcaagaaggatctcttgtagcccaggctagtttcaagttcaaactgtagcagaggctggccttgacctcctgtgcctcctccaccacttcccaagtgctgggattgtagatgaacaccaccaatctggctcccattgcttttactctgcctgtggggctcaccagcgtgaaggctgcagcctatggagggctgagtgtgttcctgcctgctctctgtgagctcactcaagtccacagccactgcattaggaagagacaactattcaaaggagcatgcagccgagactcaagctgagtatgggcgcaggcttacacactcgggaggtcagtcctggccccagagtacattgtggctatcacccctaccacagcatgtcacagtggaggccccagattttggcacactgttacagggggaatgaggaaatctgttttaactgttagttggctgtgtatctgaatttcttggcatttgggaatcctccctggtttcaggatattctttgttctccatttagctcagtctgggcagctcaccgttagatcagaagttcccgtcttcacaggcctgggtagtaagaaaggaaattgcttcttgcagagtggcagataaagttacttcatggcaggatgtttctcctcagggcctccagactgaggcttaagaggtggcgaagggaacgtggtggatgttcccatgcttggaccataggcaaggatgcagagactcaaataggcatctgccacagcgggcaagcacgtggtgggcctctgccagcctggtccacttctctgcttctacgtccccaggggagaagctgcttgaagggcaagtgatccagctggaggacgggaccactgcgtacattcaccaggtgacgatacagaaaggtgaggcgccccagacacccatgtggagggaggtctggcagccccaagtgccctccatggccacaagctccagaggaggactggcattgctctccttgcagagtctttctcctttgaagatggtcagcccgtgcagctggaagacggcagcatggcctacatacaccacacacccaaaggtgggcccgtgggcatcgtggctggtggggagggaagaggcttggggtgagcacaagcaccctcttcccagagataagacccagctaacctggagaacagccttgcatagcttccctgggcagaccacgggcgtggggcagggagtcttgacatcagcgtaggtgctgtaggcgctggtaccttgtcacaccaggggaaggacactcactcatctttaacagtaggtgtagtgaccatgggagctcctaactactaaagagtaaacgcttaggctgggtgtgctggtcacgcctttaatcccacactcaggaagcagggcaggaggatctgtgtgagttcgaggccagcctagtctatataagcgagtctaggacagccagggctctgttacacggagaaatcctgtctcgaaaaagtaaaaaccaaccaaccaaataacagacaaacaaacaaacaaccaacaaacaaggaagagaggaagggggagggagggannnnnnnnnnnnnnnnnnnnnnnnnnnnnnnnnnnnnnnnnggagggaggaagggagggagggaaaggagtgatcattgtctggccgcagtctctgtcagtgtgggagcatacacagcagaacagagtcagacagccctgccccctgcagctcagctgtgatgggtgaatggcacactgagcagaaccagagtgagcgcctctgagcaagggtggatagactcaccaggggcggctgtgtgagctgctcccccttctgaccacgcctttttgcacaagaaattttatgcatccctagataatatagttatgtaaaattgctatacaaataccaataagaatcataaagaaatttacaactcttggcctggagaggtgactcagtagttaggagcgcatactgctcttacaggagacccaggcttgattcccagcacccacaaccaggcggcatacaatggcctgcagctccagtttcacaggatctggtgttctctggcctcctcagcctcctgtacacaatgatgcacatcaactcacacaggcactcttacacacgcatgcatacatttttaaatcctaaaacgccaagttctttgacagttccgccttcactgtgattgaagacaaatacagattcacatgctgaggtctcggctaaatgggccccaggatgatgacagatgcgagctgtagagcatcttcaacagtgcagacctgactgaagctcaatgccccatcacattgcgcagtgactgatggcagcagcgtgtttagagccatctcactatcctatcccagaccagaattcacttaacagtttttataaaattcaaactggcaatccaaactgcaggttttttttttaattaattaatttatttatttattatatacaagtacactgtagctgtcttcagacacaccagaagagggcatcagatctcattacagatggttgtgagccaccatgtggttgctgggatttgaactcaggacctctgggagagcagtcagtgcccttaactgctgagccatctttccagcccccaaattgcaatttttgttgttgttgttgttttgttttttcaagatagggtttctttgtatagccctggctgtcctggaactcactttgtagaccaggctggcctcgaactcagaaatccccctgcctctgcctcctgagtgctgggattaaaggtgtgcgccaccacgtacaaaaactgcaatttctaaaaatcaaacctatagcataatatagcccaaaggtagactgatttgattcttgttgagcaatgactttaggaaaatactatattattattttccattaaacaataatgattctgtaagagtagaaagtgcgtgcaaataacacagaatcagatctgaggtgtttcagtggtggttggtttgtgttgtgtggcttgttagcatgcagaatgcaaagtgtgtgtaccatgtttagaactgaggctgaacacgtgaggtcacatgacacaaaactagcagcccctcagaaataccccaggttcactgaacattttgttttgcatcagtttttagctgatgcccattcagagacattcagggatgcccagcttttcacagctccaacatcccattgaatagagccacatggggtcacttatccactgtctaagcatcgggagcttagggaagaggagtggcagggtaggaccggccagtgcggggaggtaacctttactggagcaatagggctgggagacccagcaaggagatgagagccagggccagggtgagtccagcccatcagaatagagatttgggttttcatcctaagactaaatgatgtggggtgaggactggccagtgtctgggcaggaagcccttgggagaatctggttagtgtgccctgggaggccttgtgcttgtgagaggcagtcctagttggaccaatgagaggaagtcaccacaatgaggccccctgaagagacttcgcacggctcccctctggtgtactctctgatcatcatctaaagccagggtctcagctgagtgtccccgcgtgctattaggcctaacctcgtgtgccctgtagagggctgtgaccccagcgccctggaagctgtccagctggaagacggttccactgcctacatccatcaccctgtgcctgtgccgtcggacagcgccatcctggctgtgcagacggaggcgggcttggaggacctggcagcggaagacgaggaaggcttcggcacggacacagtggtggccctggagcagtatgccagcaaggtgagaacctggctccgccacttgcccaccacctcttggcgctaccaaaaccctacttctctggccaagggtagtggtccatgctagaatcccagtccttggcatgtggagacaggagcttaaagccatcttgaaccacacaagatcctatctcaaaccaaaacaatttcactctctagaaaacagtggtgggtctgtgcttgggctcattctgggctaccctggcctcagcccatctgctccagctcttcctcagcccatctgcccccgcgcctcccactgctcttctctcctttccccccactggggccatgacagacagacagacagctgtgcactgacccttgttttgccctctgagaagggaaggctgctgtagggacagtggtttctgagtggcaggaagtgagcaccagccacctcaagctgcagtgacaatcctctgctcattgggaaagctctgcctgtgccttttcattagttttcccatccagtaaagtaagatgccgctatatttattgcttctctgagactgacttagacactggggaataaagccagcaggcagtgagcaggcctgtgcaccagagctgctggggctctgggaaagggagcctgatgagaggagccctggttacctgctgaggacagagacctgtgagtcaaggctagaccacagagccttggatggatggggcagagttaaccaaacaccaattaacctgcaagccgggagggtttagttttctaagtttcttagttttcctctaaaagaggaaatttttatgtctcttcaaaaggaagcacaaaatttactacaggcccctctggctacacctccagcccctgtgccgtagggtatgtttttttttttttaaagatttatttatttattatatgtaagtacaccatagctgtcttcagacacaccagaagagggcgtcagatcttgttacagatggttgtgagccaccatgtggttgctgggatttgaactctggaccttgggaagagcagtcgggtggggtgctcttacccactgagccatctcaccagcccctgccatagggtatgttaaaggccagatgtgaaacagaaagagaactaggctttatcaaaagcaagagcctcgaggtcagggctggctctgccaccgcctactccagccgtgggtaagagctcagtggaaccaggtgatttcagaagtcacttccacctgtgactccagcccatgatcatggtgcttgctccgaagcaaggtctcctttgaggagaagaagacatgctgatcagccccagcatcctaggtgtatggtcagcaggggttctaactcagcctagctcagggcaaccctgctacccaggagattctgctagataccccgaatacccagcctccctgctccatcagggctgcaccatcaggacttcatgtcagcctcgtggagtctgctagctgtccctgtctagatgtgtatctctgcctcaggtgcactctctcacacacatcatagatgtatgtttgtatatatctatgtatatacatatgtgtgtatacatacacacactaataaaaatcaatttatcaaaaggagtttcagttttgtcccctcccttccagaaccacctgagtccagcctttagccacaggagctatgctgtggggtttggatgagtgtttgaacccttagttcccagttggtgacactgggaacttttaaaaggggcagcgggaggtgtgccactgggtgtggcctttgagatttaaagcccctcccatgccactttctttctttccgggggtttttgcttgtgctgggaaactgagctctctgcttctctgttcctgccccgtgcagggttaattctgttcttcgggtcttaggctctcagctgggtcttgtgtcctcccttctcatcccctcgggagtacatacagcaacactaagatggttggtttttggtttttggttttttggttcttcgagacagggtttctctgtgtaaccctggctgtcctggaactcactctgtagaccaggctggcctcgaactcagaaatccgcctgcctctgcctcccaagtgctgggattaaaggcgtgcgccaccacatccggcattgttttttttttttccctcaggttctgcacgatagccctgcttcccacaatggcaaagggcagcaggttggagaccgagctttccgctgtggctacaagggctgtggtcgtctctacaccactgcccatcacttaaaggtaaggctggcaggtggctttgagccccgcctcttccctgtaagactgctctggcgccaccctggcccctccccatgtcacctgcaggagggaagatgcacatgcacagaagtgtccacatagaaagctgggacacagagtgtgggagggaagagaaccagcggactcagccagtcccatccctgagctacgggtttgctttccctcgcaggtccacgaacgagctcacacaggggaccgcccatacaggtgtgactttcccagctgtggaaaggcctttgcaacaggtaacatatctggatgaaggcaaggtctgaaaccagttgacagcaaagggttctagatctacttggggacctcacaaaggtggccaagcacagactgtgctgtcccagagagaccactgaggtgtctctgaaggacctttggaagaggctggggcacaggagagaggcctgtctcttgtatcagctctggcagccaccagctgtaggctgctgaagcctgtggcttctctggctttgtttgctctgggaaacaagggccctcgggctcagcttctctaggctccctctgagattcatgctctggaatgtctccgtctggccttacaaagcgtcccagggcactgtgggcttttccttggcaggatgggtcaggggctgtcctgggcctgtggagcatcctggaacatcacttaggatagagagcctctaaggcaggcaggcagggatgaggcttcgctgaccactcttcttatatcacaccacacatggacaggctatgggctaaaaagtcatgttcgtactcacacgggtgagaaaccatacaagtgcccagaggagctgtgcagcaaagccttcaagacctcaggggacctgcagaaacacgtgcggacccacacaggtaggctgggccctgctgccccatccccaggggctcactctgcttttcagattgaggcccagagcccagagctgtcctttcttgctctggccctcctgagctgtccctcaatcccctgtctgcacaggtgagcgcccattccggtgcccttttgagggctgtggccgctccttcaccacatcaaatatccgcaaggtacatgtgcgcacccacacaggcgagcggccctacacctgccccgagccccactgtggtcgtggcttcaccagcgccaccaactacaagaatcatgtgcgcatccatacaggtgggccagctggtgtgtgaggagcccctccccagaccccacctcccccttctgtgggcttctgatcggggacctctcagctccagccttctctgccagccagccactccaggctgggcaggggtgggtaccccaaatgctgtctcacctaccatgagcagtgccccattggtagctgggtctagtccgacagtcctgttcgcctctgtagagtaggacagctcctagccgcacttggatggaaatgtcacctgtgtctccttcaagcatctactctgcacgtgactctggggtccagtctccagtgccagcccctgtctagcttcccgccatctctcagccatttctcccatcctgacactgtgttctttaccccactgtctctcctcttatgcctgcaactcttagccccgtaccccaccattgcagtgtctgccctcactccccttctctaagtgccccttactctttccaccttgtctctgggtgcggaggtcccaatctcgtgccctcctgtcttccacaggccatcttccccaactcctgcccccaagtctcagttctcagccctttcccctggctttcctgtcaccagtcctgtccccaaccctatccccttagcttcccccttgccagccccagttcccacccccctcacagcccagtgtccccaggggagaagccatacgtttgcacggtgccaggctgcggaaagcgctttacggagtactcgagcctgtacaaacaccacgtggtgcacacacattgcaagccctacacgtgcagtagctgtggcaagacctaccggcaaacctccaccctggccatgcacaagcgcagcgcacacggggagctggaggccacggaggagagcgagcaggccctgtatgagcagcagcagctggagggtgagggagcagagagtgggaggcagggccacagagcctctccggacatctagcatcgagtaacagtctaggctctcttttcctagccgcctctgctgctgaggaaagccccccacccaaaccaacccacattgcttacctttcggaagtgaaggaagagagcagtgccatcccaacccaagtagccatggtgacggaggaggatgggccccctcaggtggctctgatcactcaggacggtacccagcaggtagaagccctggggatgggtggagcagtctcccaatggcccctgaggtcctcggcctcacctccacccaagcacctgttttgcctttatgggctttagagagctagatctgaggggaccagtgtgtcacccagccctgctcctcccagtgtcctcatctgaatgacatgcctgtgcttaagtggggtcacatcaggtctcgaggatcttgaagtcagaagtctgccagtgttgtggccacagagtaccttgccccttggccatacctcattgtctagtgtgcctctttctactagggtgaagaggaaggcacgctaggtggaggccctgacctgcatgcagggggttacagaggcaaagtagtgggaggtgcaagtgccagagagaggccttgctgctgcttctgtagccgtggccctgcgctgtgccagtgcccaagcccagtgctcccacccctgactccagctcatgtccctcctgtctgcaggtcagcctgtccccagaagacctgcaggccctggggagtgccatcagtgtggtgacacagcacggcagcaccaccctcaccatccccggtcatcatgaagaactagccacatctggcacacacacggtcaccatggtcagcgctgatggcacgcagactcagcccgtatgaccaggcactttccttgttctctgtgtaaccttgtcatgggggtcagagggcattacatgcacagaccaaaccatccaagatttcatgagacaaagacaccataaaagtctccctgccaggcctagtggtatgagcctgtagttgtagctaaggcaggaggaccacaactttaaggtcagtctgggcaaagcaaagtatggggtacagctcagtcatagagctgccatctggcatgtgtgaagtcctaggttcagttcccaagactcaaccacccagactatttatttatttatttattcattatatgtaagtacactgtagctgtcttcagacactccagaagatagcattatagatggttgtgagccaccatgtggttgctgggatttgaactcaggacctttggaagagcagttggtgctcttaaccactgagccatctcaccagaccccaacctcccagactttaaagtcacccctcaaaggccaggtgtggtggtacacacctttaatcccaacactctggaggcagaggcaggaaagcatctgtgagttcaaggccagcctgatctatattataacaatttctaggaccacaaagagagaccatgtctcaaacaacaaacaaatccagtcccctagggctggagagatggctcagcggttaagagcaccgactgctcttctgaaggtcctgagttcaaatcccagcaaccacatggtgcctcacagccatctgtaatgagatctgataccctcttctggggtttctgaagacagctacagtgtacttacatataataaataaataaattttaaaaaacaaaaaaataaaaaaccagtcccctcagcaaccttcatccttaaaagcctttggcaggcagctccaggcagcgtatctgccataggtgtactccctgcgatttggaactaagacagctccgggtcagcctggacagcttactcaaaaacacaaagcatgggaaggactgggtgtagcttggtggctctgaacaccaagtccctaagttcagtccccagtgctgtctctaccaacctgacagcctgcaagaaaatcgtgcaaactaaagagaaaaatgcaatcacaatcacctccacagcgcagtgaccttgtccgtcccgtctgtgctgccccagccatggagcaggtgcaaggtcttctgcttctgtgtctccaggtcacaatcattacctctggggccttggtgactgaggactcaagcgtggcgtctcttcatcaccaacaggtggcgctgttggccacagccaacggaacacacatcgcagtgcaggtgggctgaagactggagggagagggagcctgaaagggagtgggggtggggggcgtgggcagtgagggagagctcaggccccctctgcctatacaaggagactggggagtccttcaccttggggtggctgaggcagcacctgtgcttcacgcttagtctctccacctgggagacagagaagctggagcgaatcctctctaaggcgttttccagccagttgctgttctgtgagccagctgatgtctaacacagagtagcctgtggtctgcccaggacgtgcctaacagggctctttaccagggagttttcctctagtagagccctaataagaaagagcctttaaccccagcacttgggaggcagaggcaggtggatctctgagtttgaggccactcactacagagtgagtttcaggacagccagggctacacagagaaacctgtctcgaaaaccaaaccaaccaagggagtgggtggagcacacaggtctgtggggtctggaagggaggaactgacctctccccctgctgcacctctccacagctggaggaccagcagaccctggaggaggccataagcgtagccactgctgctatgcagcaaggggctgtgaccctggaaaccacagagagcggctgctgagcccaagaggaccagctcccacaccacactggagaaggctccatgctcacaggcagccctgcctccggggcccccagccacagctgaccccaagaagatggccgcataggcctcaggggtgatgaggcaacaggaaaatggcctctagtggaaaggtctgtgggctacacccaagatgagggccaggcagcaggcagtcgacactgagcttggtcaccaggctgccagacacctgcgtccctcccttggcaggatattattcctgctctgtccactcccttcctcagggaggtggtgactaggtggacgaggactggcctccaccctggctgctagtaccaccaggggaaaggccgacagctttcagcccagcgcctcccagcaataaccgtctcctggggctacggtggccaagatgcctagccacttggcaccagggacttcccaccaccacagtcagaattaattcctcaggggcctgtggctggagtgaaggtgcctcttcgcttgtctgtggcagagaggcaagcgagtggcctgtacccagactgctggggactgggtttcatttgttttgtggtttgggtttttaatcctattttgataattttttttcctgctctgggtggtggtggcaaacgggcggatgagtatttaataaaagttgcaagtttccacctgggctcctccatcatttcagtgctggtccctggtggcagggctggccaagctccagcctgctttcctagccctgcgtggcctcagcgcccacccatgcagcaggtggctctccatgggtccaggcaggaagaggccctaagagaggtgagctctgggacccgctggtaggcttttgcccacacctacgccaaacaggacccgagtggctgtgcttcttcctgggctgtggctgaatctggggtaatgcccgggctgccagaattctgggtcttctgccttgccatcattgaacagagcctggacccttccttccctgccaccatcactacatacaacctcaccagggttccagtgacttcttcccagtgctaacatcccggctctgtaacccagttagggggcaggatgtctaagttcatgccgtgagaccccaaagacacagggggaccccgctaaagaacccccaaaaagaacgtcagaaggccagagcagccacagctggacaggttctggcacctcatgaagagcagctataatgctacccacagctgtgtaggaacactgtgggaactgtgggagcctctccctccctcctcgtcatctctctgtatgatgctctcatgagcccccagccccttcctgctgacagagccaggaaatcagggaccaagtgcataagattatcctctcctgggacacctaaggaagccctcatttgctgttgctcagctgggatcttttctctcctcctcctcctcttcctctcctcctcctcttcttcctcctcctcttcctcctcctctcttcctcttccccctctcctcctcttcttcttcctcctcttcctcctcctcctccttcttcctctctctctctctcttcctctctctctctcccctcccttcctccctccccccttctgggcttttttatagtttgtttttgagacagaactgttcttcatagcctaggtggtctcaaactcatcccaaggttttagaactccaagtgaggagcaagtggaggggctgggtatatgcccctgtgagtgagtaggtggatgggtggagcacaactccagaattagcttccactgacttcattgaaatttaatggccaccatgatctgtgtgggcattgcatctgaagaagtggaggctgctgaagagggctctgcccatggcctgccctgcccctgactggatttctgacgtgagccccactgtcaaggtcaccctgtgtgcctaaatacaggctctggtgtcttgaaagccatcaagtacaaagtgggcagtattctgaagtttcttttagagccaaggcccggggagggggaaacagcaaaccaaactgccaaggcaccctgtcgtggagaagcggagaagcagctggctctgtccttcctccgctgggttgcttttgcttgggtagaactctgcactgagcttctgctgggtggctctaaagaaatatcctgtcccgggcctacagggcctacagttttctttctgtccagtctcaggcacccacacagctctgtgaggtaggaacgtactaagagtagactgttggggctaactcatccaatcgcttccacttggtaagcttgactcctgatcctgtgtccctccaagtctggaagggcctgcttcctctctctagagctaccactgggagcctgggaagatcctgaggcaagcaggcttctaaagtgactatctgtgctgagggagccagggcccaaaggagggctccagctctgggagggtcagccctggaagcagagcgtggcgagagcagctggctaggccctggaagcaagagggaacaggcaggtggagctctcgctccgctctgcaccagggcctctctgcggtctgcagccgtttgcatttcctgaaaccggatcttggtgtcagagccgcccctgggccggggcgggcgcctcagccatggccctgcgcaaggagctgctcaagtctatctggtacgccttcactgcactggacgtggagaagagcggcaaggtctccaagtcccaactcaaggtgagtggcatccttggggctcaggggaggctgactcaacgtgccagctcccaccccagagagtcagccacggaagcctttgctactggcagacaccttgccatccagcagccctggccccgggtggagcgctgacggggccacaaaggcagcgtagctcagtggatgctccccagagggctcatgccaccagaagccactgtctagaaccaagtaccctgactggacagacagtagaggtggcatcacgaggttccgagattgagtagccaggccccttcccgggctccttgtgggttccccagcgtcatgcttgggcacgtaccctgctcctccctgtggcttcctcatggctttgaagaaaaacagttagtgcttgcccttggctctgagagcctcctccatttgcaaagcaagctggcgacttgaagcaagcggtaatgtgggccacctatcagcgcaggaacagaacaggttgggagatttatcttataagacctcgggctgagggtgtcggggaagccgggtctgagaaaacctcttccgtgaccacacacacacacacacacacacacacacacactctactcacccccatcatcttaaaaccattaggcctggacagttccaaggagcggaaggagctctctccttcctgggtaggtgtcttcttcccaggggagaatgtaggagaaaccagcagaagtctaggctgctggagccagggagtgttgggccaagtgtcagagtagcctcaaccctgctagggatccagtcactctctgtaaatactttacctggagcaccacaggaggctgtgtctgcctcccactcgcccctcaagatctgggtatttacaatttccactgttcacaaccatgataggaaccctgggaggcagatggcacagaacaggcatggcccacctctgtctcaactccgacattgctgaagctgggtcctatgaacttagaagctctagccagctccatctacccagctgagctggctttctgagcatctaatgactaaggttctactgccccaggaaagagagtccagtaccacctctggttccctagagaggcaaggttagcccttcccatgtctgcccagctctcgtcaccgagttgagttctgcccagaaagaaaaacaggtcatccagacaccaatcctgtagaaactgtgccccccccccccccacacacacaccttcccccaaaccctgtctctttagtactccaccacatggcttcttgctcccaagatactatgttccatctctgtgacttctgacccctctccaggctctctgtgtgccttgtgtgcatagtgtgcagcccttggtgtcatcagttagaaaggcctcccaattagagcccccccccccgttagcttctgaccagccccttcctgccccactcccactccccaatgcccacaggttgggaatttctggggaagaacctctgagcgcatatacccttaaactgtgctcctccctgctcgaatcgagccctcttgtagtgacatctctggccagaaacagtaaatgtcactcacatctgcctcacaggaaacctgtccactctcaaactaacactgagagttttggggccatgtgaatgagaggcagaaatgtcaggacccttgcatgtgagggaagggtcccccccccccaacctgggccaatgtggtggatgctgggccgggagggaagtaatgacattgctggaggtggggagagtcagagaggaggaatggagaagtggtcagaaggtggaggaagaagcagaggacagagataggctagcagggtacacccagtctcctgtggatgtagggggtgagggctcgggcttagctggttttaagaatatggttcacagccttggtggcctctgatggggacaggcaggaaactgtataacccccccaaccccagatcacactgagtctgagttgcctcttctcccctccgannnnnnnnnnnnnnnnnnnnnnnnnnnnnnnnnnnnnnnnnnnnnnnnnnnnnnnnnnnnnnnnnnnnnnnnnnnnnnnnnnnnnnnnnnnnnnnnnnnnnnnnnnnnnnnnnnnnnnnnnnnnnnnnnnnnnnnnnnnnnnnnnnnnnnnnnnnnnnnnnnnnnnnnnnnnnnnnnnnnnnnnnnnnnnnnnnnnnnnnnnnnnnnnnnnnnnnnnnnnnnnnnnnnnnnnnnnnnnnnnnnnnnnnnnnnnnnnnnnnnnnnnnnnnnnnnnnnnnnnnnnnnnnnnnnnnnnnnnnnnnnnnnnnnnnnnnnnnnnnnnnnnnnnnnnnnnnnnnnnnnnnnnnnnnnnnnnnnnnnnnnnnnnnnnnnnnnnnnnnnnnnnnnnnnnnnnnnnnnnnnnnnnnnnnnnnnnnnnnnnnnnnnnnnnnnnnnnnnnnnnnnnnnnnnnnnnnnnnnnnnnnnnnnnnnnnnnnnnnnnnnnnnnnnnnnnnnnnnnnnnnnnnnnnnnnnnnnnnnnnnnnnnnnnnnnnnnnnnnnnnnnnnnnnnnnnnnnnnnnnnnnnnnnnnnnnnnnnnnnnnnnnnnnnnnnnnnnnnnnnnnnnnnnnnnnnnnnnnnnnnnnnnnnnnnnnnnnnnnnnnnnnnnnnnnnnnnnnnnnnnnnnnnnnnnnnnnnnnnnnnnnnnnnnnnnnnnnnnnnnnnnnnnnnnnnnnnnnnnnnnnnnnnnnnnnnnnnnnnnnnnnnnnnnnnnnnnnnnnnnnnnnnnnnnnnnnnnnnnnnnnnnnnnnnnnnnnnnnnnnnnnnnnnnnnnnnnnnnnnnnnnnnnnnnnnnnnnnnnnnnnnnnnnnnnnnnnnnnnnnnnnnnnnnnnnnnnnnnnnnnnnnnnnnnnnnnnnnnnnnnnnnnnnnnnnnnnnnnnnnnnnnnnnnnnnnnnnnnnnnnnnnnnnnnnnnnnnnnnnnnnnnnnnnnnnnnnnnnnnnnnnnnnnnnnnnnnnnnnnnnnnnnnnnnnnnnnnnnnnnnnnnnnnnnnnnnnnnnnnnnnnnnnnnnnnnnnnnnnnnnnnnnnnnnnnnnnnnnnnnnnnnnnnnnnnnnnnnnnnnnnnnnnnnnnnnnnnnnnnnnnnnnnnnnnnnnnnnnnnnnnnnnnnnnnnnnnnnnnnnnnnnnnnnnnnnnnnnnnnnnnnnnnnnnnnnnnnnnnnnnnnnnnnnnnnnnnnnnnnnnnnnnnnnnnnnnnnnnnnnnnnnnnnnnnnnnnnnnnnnnnnnnnnnnnnnnnnnnnnnnnnnnnnnnnnnnnnnnnnnnnnnnnnnnnnntcggtcactccactgtcaggggactaagcacctgtgcccaccatgccctggctgcatcttttaagataatgactcgaaacactcatgcagaggtcacacctatgatcccagcacttggggggagccaggggggtgcgttgctgagtcaggaggattgctgagaagttggggccagcctgagctacagtgtaagatcctatctcaaaaaaaagaacaaaccctgtttaggagagagattattcatgctttgtgaggtcactgcctgctgcttccatggggttcccactttgtgttcatctccccagcccctgttagacaggggtccaggatctgaactgggcactgcagagccacaacttccaatcttgtggtcagtgtagacatggcagctaatttctcccaggtccctccaggagagcatcacccacacccacacaggaaggagcaaacacatagaaccttctacgcccagggctgcccactttgaagtcagggaccgagggactccagatgacagcgtatgaaaaatacagacacctagaccccacccccggaaactgtgagtcagggaggggtaggtctttcagtttcacctgctccagtcaagacccagagggggcctcggagctagaccctggccatgtcacttcctcccaaagcctccatttccttacctgtgaagctcagataatgagctccctacctcctggcccagggttgattgagatcttgcagtgagctcctgcccactgctaccccacccctgccgtttcctttcctgtctggtcccacccctcaccccacctcaggagtaggaaagtctagcagtctgaggtcagcctctctgtgcagagggccccaagtgtctagagccccaagtcccacctcatccagacaactgacagccccggtcctggactcggcaaagtcagtcacaaaaggatgaggaacctgtaatgttaggaggatgcgagtgaacacccaagggagggaacagacctggggatgcatctgagctgatggaggccttgcctaagtgcatccacgtgtgtcccatcccaggattgggttaatccggcactgcctaaacggggcatggcacagaacatgattggatggaagaggcaagaggatcaggagttcaaggtcatacagaaggagtctgaggcgagcccagactagctgagagcttgcctcgagaaacaaaacaggaatggactggagagatggctcagtggttaagagtaaagaacccgatgtcctttggtgttgaacagcttcctcgtaagtccagttctataaacaagtaagatgatattgacctttaacctcagcactagaacactgaggtagaaagactggaaggccagcttaggctacagagtggcatcctgtctcaaatgcccctcctcgattttctttctgtcagatttaaacaacagaccggctggcaggcactcagcaggttaacacatctgctgccaagccttacggcccgagtcgcatcctgggcaccaccctcaccccccaatccttgttgcaagagaactgactccccataagttgtcctctgagctccacacaagagctgctaaaataatagatttggaaaacaaagtgcacccttaacagctatcattactccgcctggttattaagttgtgctctgaaatgatcttgggctgccctgtttgtgaatttctgggtgtcacccattcagaacttgtcagccaaaccctttccccagagttcagttgatgtcctctctggatctgtgttgactctcttagtgactcataagagctgtgagctgtttgcccctcccatcccccactcctcccaaccccaccacctcaaataagtaaatgttaaaacaaacaccttagaggtgactctagaagcactagctgcttctccagaggactcaaggtctggctcacaacagtctgtaactgcagttccaggcgatctgacgccctcttctggcccgtgcaggcactgcatgcacatgatgcacaggcatatatgcaggcaaaaataaccatacatttaaaatacaattttaatcgtttttttttagattatgtttatttaagacctaggaatgactaagtagttaagagctcatattctcttgaagaagacctgactgaggttggcttccagcgcccacatcagatagatggctcacagtgtatataattccagctccaggaagtctgctgtccttctctggcctctgagggtacctacggttatccgaacatacccacacataagtgcatgcgcgtgcatgtgtgcacacacacacacagagacatcacacaaaaagtcaaataaaccttcatagaatggaaaaaaaaagaattgaattctgggtcaaaggtcacatccgatttaaaagattatatttttgttgttgttgttgttggtggtggtggtggtgatgtgtgtgtgtgtgtgtgtgtgtgtgtgtgtgtgtgcatttatgagtgtgggtaccttcagaggccagatgaggatccagatgtcctaaggtacaggcagttgtgaactgcctgatacagatgtcgggaactgagcttaggttctgtggaagagcagccagtgctcctagccactgagccacctctgccgcccacacccacttttaaattgagagattcctgaactccatgaagatgtctaatttagccagtgatgatggtagcacactgctgtattctcagcattgggatgtaaacaggaggaccttgagatcaaggttatatttggttaattgtgagtttaaggtcagccttggctacatatacataactcacaccctggtggtaggttattcaagctcccatttcctcagtatttgctgataccgtcttttgcatttttgacaaataggtttttaaaaaagcaaaccactttccacactgggcaggaactcacattcattgcgtgcagagctgagcctggctctgcatctctgtcatctcctgccttatcatccacagcagctatagcccattttattgaaaacaaaaccaaggctcagagcgtgaagggctttatccaagatcacacatgccttcccatgttccctgtcctcactagagggtagccatttggctggggctttgcaggaagcatcctcaaataggcactttgagaagagacacagcagatgagagtaagacctttttttttttttttaaagatttatttatttatttattacatgtaagtacactgtagctgtcttcagacactccagaagagggagtcagatctcattacggatggttgtgagccaccatgtggttgctgggatttgaacttcggaccttcggaagagcagtcgggtgctcttacccactgagccatctcaccagccccaacttttttttttaatgatttatttattatacgtaagtaaactgtagctgtcttcagacacacaccagaagagggcattagatctcattacaaatggttgtgagccaccatgtggttgctgggatttgaactcaggacctctggaagagcagtcagtgctcttaaccactgagccgtctctccagcaccgtaagtaagactcttggatgattactgtcattttaaatagtctgtgggccacttggcggtggtgccctttgatcccagtactctggaggcagaggcaggtggatctttgtgagttcaaggccagcctggtctacagagttccaggacagccaaggctacacagaggaaaccctgtctcaaaaacaaaacaaagaataataatcatggaaagaaaaaagactgtgggtgccctgccctgttttctggaggcagtcgctggacttttaaatgttagaccttgagctgatggcaccccttaaactaaccacaaatgcattagctagaacttgcctggatctaagtaacaaggataactcagatgggttaagggaagggatatttactagctctcagccagaattccaggaacagggctgggagaacagcttagtgatagaacacttacctatttgcaaggtcctgggtccatcactagcatagacacatacacacacacacacactcacacacacacacacacacaccactcacatacatactcatgtacacatatacacatgcacacacacatacacacttgcacatatgcatacatatacacactcatgcacacactcatgcacacaatcatacacacacattcacacatacacatttgcatgttcacacccacacacaaattatttatttggttttttttggagtgtctcatgtagcctaggctagcctcaactcctgatccttcttcctcccaaagcgccaggactacatgtctgctcaccacgttcgtgacgcctttaccttctctttcctttaaataaaacagcaatttggactggaaaggtgacccagtgtgtaacgtgtttcctgacaagcctgacatggcggaaggaaaagactgggtcctccaagttgtcctctgatctccatatctacagcacggcttaagcataaggaataaatgcaataagaaattttaaatcactttatacagtggctgtaacatggggagcaacagggatgcaatactttttctttgagacggggtctcactgtgtatccttgaactgtccttgaactctctatgtagaccaggatggcctagaactcagagaccctcctgcctctgcctcctgagtatagggattaaaggcatatgctaccatatcccacccaataagtgactattttttaacagtattttaaccacagtgttgatgattactcattgtaacagaatttccccaaagctccttcccactcccctctttttaccaaagtttctggttcaaaccagccctttgtcttagcaccatggatctcctaagccagtgcccaccccaccccaacccccacacgccatcactgccacacagctaccatctctcctgtttctccatctcaggggccatttctcacaggcattctctgaaccttcccttgctcccttccctattcagaggcctctcctctcatcacattagcctgggcgcacatggcagcctgcgtctttggttaaaagtgatgaagtcgagggtcttgccctgtaatggcccactgcctccctgcagatagcctagagctcatagggctctgaaatcttaccactcccgggctcctaaggtgtaacaaaataaccgggaagagtcctcccgggtctgaatccctgctctgccagctgagtgggtcctcaaggtttctcctctgtcacctggggacagaggttgttgctatgacagtgatgtgaatgagggacccaagagtctgctcttgtgtgtcaaataggacggtgcccacagagaactcagtcgaggcagggcagggatgaaagagcaaacaagatggactcatagtcttttggccaaggtctgatccggatgcagaaaagcaacctgttgctctgtccaaggtgctgtcccacaacctgtacactgtcctgaacatcccccatgaccccgtggccctggaggagcacttccgggatgacgatgatggcccggtgtccagtcaaggttacatgccctacctcaacaagtacatcctagacaaggtgaggagctcgtggggagcaaccgcttcccacccccccccagcaccctaacaccttgccttctccccaaacactccactcccctggtaaactcccatttctgcccatgctctctgtccctgctcctcaatctgcagttgccatccaaccacttgttccctattgtctgtcatctctcttagctcccgcgtctccctgccgaagcccacactaatttccaccctactcttctcggctgtctcagtttttgagggttctcctcggctgtgccgtctcctgggcttcccttcctttctcccttgggctgagaaactagtttcattcttgccatggaaattagagtgtgaaagtaacattggagtgtctgagccaactttgagttcagtcttgggcttggcgggatggggaggtggggtctgtagatgaacccacgaaggtaggctggagctgcggtaggaggaggatgaagcagcgggctgatgcaagcctcaccgcaggtggaggagggagctttcgttaaggagcacttcgatgagttgtgctggaccctgactgccaagaagaactacagggcagatggcatcgggagcagcccactctctaatcaggatgctttccgtctatggtgcctcttcaacttcctgtctgaggacaagtacccgctgatcatggttcccgatgaggtaagggtgacatcagaaccagacggtggagtcactgagggccaagcccctggcaaagcctcaaaggaagacagagtatcattgggcgttcccagatcccctaacttcacggggcaccccatttccggggaggggtgcggggaggggggactctgcaagttctcagaggaagaaaatgagccacagatgtttatagtctgtggctgcatagacgaagcaccctgctgagcatttaaagaccgttcagatcctgtcgggattcggcggaacagcagggttaggcgcagcggtggtactcaaggaaaggcctttgttcaagcaaagggaagcggtgtgcagacaggaagtaactccctggttactcaaggtgggcaaccgaatctggcctttgccccagagagagtttctttccttttttttttttttttaaagtggagagccaaatagactcaaaaaaaaaaaaaaaagcaggcagggcatgatgggagtcgggggaggggaggccaggaacctgggtcctgcctccttagttctgggggaactctgagatctgaactaacgccccaggggagacccagtggtcccccagagtgtcacccgtaaagaaagtttcccaacactgctggagccagtgtgggcactctcagcaggttcttgtcagttgggacagagcagcccctcagcgagtaggaaagcccataccgctgtgagaacaaactgacacaggatgtaccccaaccactacttcctgttcctctaccatggctttcctgtgtcggccctgcttacccccaatctttgtcccactgatctcccacaagagaaggagctcaagtgctgcagattggctttggagtcagaaatccaaatggagtcctggctagcccccccccccccacacacacacacacatgctgtgggacttaaggaagtcacttcccacactgagccttggttttcatcatatgcaaagctgagggcagtgggtaggttaggagggtgttttctttaggaggctgtattctttttggtctctgtgtaacctggctatcctagaactcattctgtagaacagactggcattgaactcacagagatcctcctgcctctgcctcctgggtgctgggattaaaggtatgggccaccaccaccactaccaccaccactaccaccaccaccacactggccaggtaggagggttcttagaccatttctgatgctgtgatttgccactctgactggcctctcaagtcccatctgacccaatactttattttattttatgtatgtatgtatgtataccaggcaatacctcaaacttacagagatctagaccaggtcatgaaggcacacacttgggaggcagaggtaggtagatctctgagtttgaggccagcctggtctacaaagtgagcttcaggacagccagaattatgcagagaaaccttgtgttgaaaacccaaaagaaaaccccacaaaaaaccctcagagagatctgcccacctctgtgtcccaagcaagtgcagggattaaaggcatgagccaccaagcccaacatgaccccacttttagtttatagcagaaaaagtagtggtcttaagacagggaaggcgggggctggtgagatggctcagcggttaagagcgctgactgctcttcctaaggtcctgagttcaagtcccagcaaccacatggtggcttacaaccatctgtaatgagatctaacgccctcttctggagtgtctgaaaacagctacagtgtacttacatataataaataaataaataaataaataaataaataaataaatatttaaaaaaaaaaaagacagggaaggcggaggaggtctgggctgtgggacccctggaaaaacctctctcctggtttccacctgtgtatggcctcccccttgccctggagtcgctgttgaggtcacctggcctccctcttgctcccaggtagagtatctgctgaagaagctccttggcagcctgagtttggagatgggcctgggcgagctggaggagctgctggcccaggacgcccagtcagcccagaccgccgtggggctcagcgtctggcagtttctggaactcttcaactcaggccgctgccttcggggtgtggggcgcgactccctcagcatggccatccaagaagtctaccaggagctcatccaagacgtcctgaagcaggtcaggcaagccgggagccctggaggggacccttgggagccggtggggtgatggagacctaggaggcctcttgctgacctcgcctccggccacagggctatctgtggaagcgagggcacctgcggaggaactgggccgagcgctggttccagctgcaacccagcagcctctgctactttgggagtgaggaatgcaaggagaaacgaggcaccattcccctggatgctcactgctgtgtggaggtgaggtcacagagtgcggacagggggttgggagcaaggacggtggaaaggggaaagccgccatgatggttccgcttagttaaattagtgcatcgcaaacccacctggctacctccaggccgctcatgcccggtaggcacttttattttttcctggtcaaacgcgggggacctcctgcatgacaaggcagttgttccatcataccagcccagtgacacaacttaaaaaagactaaaaccaccgaccagatgcagaagccactggtagattattagacgtcattagagatttcagagggcctgactcagacctaacacttcctgacaaatctttccagtccctttttcctttccctttgacacagggtttcttttttcttttcttcttctttttttttttttttttggttttttggtttttttttttgttgttgttgtttttttgagacaggacttctctgtgtagtcctggctgtcctggaactcactctgtagaccaggctggcctcgaactcagaaatccgcctgcctctgcctcccaagtggtgggattaaaagcgtgcgccaccactgcccagcaacacagggtttcttgtcaacttacatagtcaacactgaccttcaattcccaatgcctttgcttctaccgcttaaatgctgggatcacgcgagtgtgtgtgtgtgtatacatgttcctgtgggtatacatgcacatatatatggaaaccaaactttaaactagggtgtcattcctcaagagatacctgcttggtttgttccttttctctttgagtgtgtgcatatgcatgtgtgtgcctgtgtgtgtctgtgtcccacacacatatgcatatggaggtcagaagtcatcccctgatgtaattccttcaggagccatttaccttatttttttgagatagaatctctcacactgggacacggggttcaccgatttagataggccgataggccagcgaaaccctgggactctcttctctctacctgccaacactgggattatagcaggcctcatcatgcctgcctgtttccttgatgctgggctaggactcaggtgtgcattcttataccacaagcactttccaattgaactaccacccacctcagcaacctcagtttctttggttttgagacagagtctctcactggtgcggatcttgccgtgtaagttaggctggtggccatcacgttctggcatctgcctgtctccacttcctcagtgctagtacaaaagcatgtacagtcatacccagcttcgatgacatcacacccggctctgatgacatcacacccagcttcgatgacatcacacccggctctgatgacgtcacacccggctctgatgacgtcacacccagctttggacacagactctagggactgatccttttatagctgagaatttcatacaacttgtcttgatcatactcacctcccattccctaactcttcctcggctcacccctcctttttccctacccaactttgtatctttttttttttttttttgaatctttcaggataatttgtgtcttaccaagtgctacactcttcctctcccagcaactaacaatttgccagtagcaccactgcccaacccccccgtcctttctgggatttggtctggcatgagcttgcacaggctttgtgtatgctgtcaaatatgtgtgtgctcattcgtgcatctgccctgccaggtccagaagataatggttccttgcagtcaccagctgcctcgggctcttacggtttttctactcccttctgaagtgatccctgaaccttgggagggagtttgcagtttatcttttccgtttcgggctgagcattctgcaccctggccaattgtggatcagtgtgttaaacaccatctactgacgacaggagcttcccagcctagggaatgcctatgagacattaggagtcagtttcatacatacatttagcagcacgatcattttgggctctcctctggggcttatgacctgtgtaggtgtgaagtgtagattttgctaccccgcctaagctctgggaatggccaagcaaccagcccccacccagcttcccttgaacccagggataaagacacagacacacacgttgttcattttcaacttgccttcttggcactattcatgggcattattaaactcctatggctagcatgcccttatcaatactcttagctctgcacctcccacctgccctaaactttagttgctcagtacatctagtccctgctaaacacccctgaccccctgcatgtaggagtggcctgtgtggccactccgtttagaggtctcacatggctggtcaacttttttccatctgaagcatgacgaactctcctctccttccttggatctgtctgcttgcctccagggacccggaggtcccgcctatcccttctgcccagcaattggctcatggcttctttactgacagatcaagaaccaattggagctggggagccgggcagtggtggcgcacgcctttaatcccagcacttgggaggcagaggcaggcggatttctgagttcgaggccagcctggtctacaaagtgagttagttccaggacagccagggctacacagagaaaccctgtctcgaaaaaaccaaaagaaaaaaaaattattaagggctcctcatactccagagactggggcagaggagacttttgaggtaggaggccaacctgggctacacaacaaaaccttgtctcaagagaaaatagttccccgaggcattatccctttctgttgcacaaagaaacaggtgttgggtaaggctccagatatctcagagccaattacgttctctatgaagtaaggtccgacaggaatatatgactgtagataaatgttgtatggaaaacactagtgcagagctgggcacgttgtggtacacgcctttaatcccagcacttgggaggcagagggagagtttgaagccagcctggtctatagagctagtctaggacagtcagagctacacaaagaaaccctgcctcagagagagagagagagagagagagagagagagagagagagagagagagagaacacaagagaacactagggcagaagagcaaggatgtcaaacacaccctgcattatcagtatctccaaacccttgaagaacgagtgccatttaagagaccaggtggaaatcagcagttgtaggtgctgagtgaggctccaggcacatgttcaagcatgtactatgtactaaaccttgtggagagataccaagaataaagtggctcgcacgcaccccgtaactaacgatccaccccagaccatgcatactcctggcagggtaggaacggtcccagagaagatggtcagccaagagaaagaggaggaagctggagctggggtactactggggcagatgtggctcctatgtcagcgaagtcacttggcctgggccatcctgtaggtgcttccggaccgcgaaggaaagcgctgcatgttttgtgtgaagactgccagccgcacctatgagatgagcgcctcagacacccgccagcgccaggagtggacggccggtgagtgccggcctgggtctaactgggcctgttcaccggagtgacctttggggcccctttgcggtggtgactagaccagggctgactccgtccggctctgcccttagccatccagactgcgatccggctgcaggcggaggggaagacgtcgctgcacaaggacctgaaacagaagcggcgggagcagcgggaacagcgcgagcgacgccgggcagccaaggaggaggagctgctgcgactgcagcagctgcaggaggagaaggagaggaagctgcaagaactggagctgctgcaggaggctcagcggcaggccgagcggctgctgcaggaagaggaggagcgccgccgtagccagcacaaggagctgcagcaggctctggagggccagctgcgggaggcggagcaggtgagactggcccagagggcggggccggggaagggttggggcggggttatgaccggggcgtgacaggaagaagagcagggcgtagtccatggtctggaggatgctatgggcggggcctagatagggtggagcccattggctgaaggatggacctaaggtagagactgaaagatgctgtgggcggggcctgaggggcccttaggggaataggttggagtagagcctggatgctttgggcatggcctaacgaatgttagggtagggccggaacaaggttagggctagggaaaacccctggtagaatgagacctggttcagaattcttttctggaggcaggacttgggccgaggaagctgcttaaggcttcttgattgcaaataatttggaatgaaatcaatctagacttgaactaaattttaacaaaaccagtttggggaccataagacgggatgcatgtgaagggcagagtagatgcacagaagcaattgactttaaattttaaattgagaaaacgcaattctagagctggctcaaaggataaaggtgcttgccacacatacctagcgtcctgaattccgttcctggaaccccagaaagatgggcagagggaaccggctccacaacgttgtcctctgaccgccacaggcatgctgtggcatgtgtgcccattacacctccgccttaagagctgtatgagctcagacatgcactaagtctctccgtatcagtaactagagctctgtatatggaaatgggacgaggattctgtgaaggaatagatgtaaggagtttaataaagccaggcaggtgctacttagtgagtttgaggccaacctgcactacctgagatcctgtctcaaagaacaaagtaggtctaaaatgatagcctcacagttaagaccactggctgctttttcagaggaccaagcttgagcttgtgcacccacatgggagctcatagccagccagcagatcgcacaccctcttcttgcctctgcgagtagtgttctcatgtggtgcacagacatatgcagccaaaacacccatgcatatgaactaataaaactataacaacaacaacctgggtggtggtggcacacgcttttattcccagcacttgggaggcagaggcaggagaatctctgtgaggtcgaggtcagcctcagagaaacttggtctcagaagaaaaataaaagcgttcaataacttgtggttattgtaataattgcagttcctggcacccgccataatgatattataattgttagggtaggagctaggaagggattaccttcgtttaatatgctggtttattgtaatataacgtattatgatgtttaattacatgtaattataaccggtgttgttttgtgtgaggctggatagcaaacatacagccatgggcacatcaggtgagccctctgctgctgagctacagccccagcaagcgtctaattattctttctaaggtcagtgcaaaaacaataggaggattcagggtcttaaacaggtcagatcaggaaaccccaactaaagaccctccatacacagagccaggaagagttagggttggggggttggggagttggctggggagggggcagtagcctgtctttctcctccggtgtcccactgattcgctctttgctccccacaggcccgggcctctatgcaggctgagatggagctgaagaaggaagaggcggcccggcaacggcagcgcatcgctgaactggaggagatgcaggagcggctgcaggaagctctgcaactagaggtgaaagctaggcgggatgaggaggccgtgcgcctcgcccagaccaggtaggcacggtggccagggaacctttcctgccagcgcccgcgcggaccctccctccccggctctgagatgtccctgtgcactctggcaggctgctggaggaggaggaggagaagctgaagcagctgatgcatctgaaggaggagcaagagcgctacatcgagcgagcgcagcaggagaagcaggagctccagcaggagatggcgctgcagagccgttccctgcagcacgcccagcagcagctggaggaagtgcggcagaaccggcagagggcagacgaggacgtggaggtgagacaaggccgggaaccgggagaagctgggggagccagtgtgtcactgagccggaccccagagccaagctacctgtctgccaactcgcattatcatcagctggctgtgccatcgcctacagattgcctaacctctctgtctgaagtctcttatctgtgagaggaagcagataccacgttaccactacagaacaagcttagtttaagcatggtatttagtatgtaaatgctgaacacacctgtggctgtgtttgccaatagtattattaacctgggcaggattccccacctcctagcctccaaaacactccccggagcttgaatgcctgtagaaaaggttctaggttgttgttgttgttgttttggttttagatttgtttcttttttaatctcttttaaaacttattaaaatgtatgtgtatgtgtgctttgtctgcatgaatgtctgtgtactacgtgtgaacagtgtgcacagaggccagcaggtgttagttattgcatcccctgagtctggagttacagttgtaagctactatatggtgctgatagagttcaaccctggtcttttaaaagcaatcagtacttttttttttttttttggtttttcgagacagggtttctctgtatagccctggctgtcctggagctcactttgtagaccaggctggcctcaaactcagaaatccgcctgcctctgcctcccgagtgctggaattaaaggcacgcccggctttaatcttttttttttttttttttttttttttttttggttgcaatcagtgctttttactccagcccaatgatgtgttttttcttaaagtaatttaaaaatgttttatttattttatgtatgactgctctgtctgcatgcccacctgcatgccagaagaaggcatcagatcccattacagatggttgtgatccaatgtgcttgctgggaattgaactcaggacctcttgaagagcagacagtgctcttaaccactgagccacctctccaaccccccaatgatgtcagtcattcatatatatatacacacacacatatacattggttgagttctaggccagcctgatctttagaatgagtttaggacagacagttacataccctacctatttttttttttttttaatttttaaccggggctgaagtggtagcttagtggttaagagtacatgctgctcttccagaggactggagttcagttcccagcatccacaggctacaaggctacaggcaggatctcctgtaacccacgctggcctttaactcattatgtagcccaggctttgacctccctctcctctacatcccaagtactagagttacaggcatggcatgcacctcaccaccatgcccagccttacaggacttcctggggggtaggggtgggggatgggtagctgtgatcagattctcagggcctctgaagatgaccaggccagcagcctccaccaccacggatggcagttctgacccactcccaccgccttgccccataggctgcccagaggaagttgcgccaggccagcaccaacgtgaaacactggaatgtccagatgaacaggctcatgcatccgatcgagccaggaggtgagccttccctggcttgggaggaaggaggggaggctgccagatcacccggatcatgaaggaggtggaactgaaggtcaaaggtttcccttctcccagagcagaggcacaaccctcacctctcccattccgactcacattttccctttctccctctcttctctctgccagataagcgacccaccaccagcagctccttcacgggcttccagccccctccgcttgcccgccgggactcctctctaaagcgcctgacccgctggggttcccaaggtaacagaaccctctcagtcaatagcagcgaacagaagtccctcaatggtggagatgagactcccatcctagctttggcctctcaggaagaaaaactggatccagcaccagggaattagctccgaccacccccttgttcttccgatgctgtgtctacggacttggccacagcaggcctgtgggtgattcctggtgctaccacctgccgaccaaaagccgatcaaggattgaacttggttgccattctcagcaggccgagaccgtggaggctgtttgagatattaatacttgagaatatggttgtgtgcttcagtctcaaggatctgggaccagaactgggaaagaaaaggaatgaccaagacaagatcatacgcccctccctccagaccaagttatggagacatacttccaaataaaactgctcacaactgcccactgctcctgcccttccctccctcccttcctttatccatccctccctccaaccacctccccatccctccctcgagttcaagttctaggtcccagggacagcaggtgtggcaaagtggttaggaacacggactgtgggctgaactaggctctgccattttctcacgggtgaacttcacgcccccccatacacacattggtctatagagaggatcataatccctgatgtagcaggcctgagtggagcgtcgtcattactagtatctgaaagtgtttattgagcatctactgtctacctggagtccacccatgttacgtcattcgcaaagaacccctaagtgctggacggctgttatcacagtaacagaggtccaggcaggttgggtaacttgtccaaagccttccaaacttttcccattttctctgactagtggtccttgttctcctagacaagacttctgagattctagattccatttccatacccctcatcccaagcctgggacatccactggggtccccgttcattataccctgtacttctctctagaatgggttacgtctggattgtccccttgcgagtgtgttaggtgccagttcctccacgagggcactatgtctgggagactgttgagcctcctgggaagtggtcacactatgctctctactgctgtccttcctggatgtaagcgatctctgactgagctacatcaccgtgcctaccgcatcatgacagagcgagccctcagaaacctaagccaaaagaagtcttccctcccttgggttgtttgtgtcagacactgtcacagtgacactgaatgactaatacaaggtcctttcccatcctcatagctgcagagtgtgagccattaattgactcctccactcggccccacgtttagtaagtcactacccctgtggtgctatgaccagaggccactgccttctaacctgtcagctcctagttaactaagagcttcccggactcccttctaattctgctgcccggatgggtgtttggaaatcctgcccagcccttgccgctgtccaaaagactttgtttggattaagacaggctctcactttatagccccgatggtccccaactgaggctcctgcctaagtctttcaagttctggggatactggtagacacaatcaggcttagctacatccaagagttaatttaattatattctctatattctctctgtgtgtctgtccgtccatccgtctgtctgtgtgtctgtctgtatgcacacacacacacgcacacgtgcgcacacacacactcacatcatggtgagtgtgtagaggtcagaggacaactttcaggaaacagttctccttctaccatgtggtcccaggtcatcaaacttggcagctggtgcctttacctgttgagccaccaccctggacctgcagaatgacttttgatagtcacgcttacttgcccctgtgccctgtgggacacgaaggccatagtcatcaagccaagaagacctgctacagttctgctgcaggggcacagcctcagcttcttcctcttgctcttctaggtctcactatgcgctcctttctcctcatttctaaatgttggaggtccttgaagacaaggacatgaattcctcaacgctgtccccaatgcctggcacagagcttgctcctaagaaaactgtgtaccaaacatgtcttgaatgagtgggatgtgtggctgggtgtggcacagttagaaagtgaggacattgctgagactggagatcaagtccgtccagcatcaaacccaatgattccttaccacgggccaggggtttgccgtgagctattatctgggaagggttccctgctttcctggagtttgcttgctatctcatcgcaaaggtcacagccttgcaagtgcacccgatgcactttcaaggaagtttgtgacatttaaagtgtcacgaaactcctgctagcgctagcgtgagggcacagagctgaggggtaggaggtgaagtccgaactccatgtgctatgggataactaagggaagcaggtcccgccccacactaggagtggaggctgcccaggcttgcctggtctgctgtgtttctgcagtgctgatgatggcagctgatggggtggtgggtctggatttggacctgggaggagttaggggaaggagtgagcatgactatggtcaaaatacaaaatgggcaagtgtgaaattctcaaaaccaacattaagaatctagcagaggagtagagttcttgcttagcatgaagcccttgttccatactcagagccacataaactgggtctagaggattccagcatgtgggaagtgcaggcaggaaggtcaggagttcaagaccagctcgagaccctccaccagagctctgccagacacaaaatggcagaaatctctgacttccccaggccattttttactacagtcttggaggacaagggaagtgatatctaaaaacttaatacaaattcatttcaaaagcaatagaagggagctagggagagagcaggaaagttaagcgcctctgctgttcacgcagagcagccagcgttcagatcccgacacacagggaaaagcagggtgtggtcctgtgaattcctgtaattgcagaaccaggatagcccaggcttgatggctgacagcctatcccaccaaaccagaaccgctcgtgcatgcatcaggagaccaggcctcaaaggaaaaccgtggaaacctatccttggaagacacacagtacccttctctgtcctccaagtgcacacgcgcacgtgcgcacgcgcacacacacacacacagacacacacactcgaaaacaaagcagaaaaaaagtggtgtggggttctccaatccagcgagctaaggatgcactgtaaggagtgccagaccgggcagaggtgacctttaatggcggtgtggaggagggaggtgcctgctgactttcctgccagccaagttttgttcattctaggatgatgaaaccagccagtgacagattgccttctggctacatactctctgtggtatatgatgagttggggtgacaggcaagcccaggtacagagttcttgtcttgtctggtccctgacatccagcgacagaaatctcaagtgggagaaaagttcttttaaaatttgttttctatttggcttcacaaggcctataagcacaggctggcccaaaactttctccattgctaaaaatgacctcaaacgggtcctctacctcctgagtgctggagttagagtgccatcatgccttccagatctttcttttttcttgtgtgggtgtatatgaaagtgcacatgcggtgtgtagagattggaagataaccttcaggaggcagtcccagggactgaactcaagtcttcaggcttggagacaaagcgatgacccgttgagccattgaactagccaccagttaaaaaattgggggtgctgaagagatgcttcagtggtgaagatcgcgcttgctactcttgaagaggctcgcttcccagcatctacatggaagttctccattgtaactccacttccaggggatccaacgccttcttccagactctgcaggcactgaacgcacatggtgcagagacagacatgcagacaaaacactctgacatataaaaatagatattttgtaaaacgtatgcgtctgtattttcattcccaagtctcccaccatatgcctctcccaagcgcctctgaaaattacagtttgcctctattccttcccccaccgcccttagctttgcttcttgcttcaaaccacacaagtctatgcctagtttcttctcaggaagagtgaggaggttgtattagatgacctccaccttctttccgcgctttaaagctttaaatatcgtttcgtgaggcttgctttgaccagccctaacttctccccagcgctttcctcagctgctgctcccacgtctgactgcagagggcgctgcagacgcgccagggcagctgtgcagtgggcggagcgatggctgtcaaaggagtggctccaggcggcgcggcgattggctactgctatggcggaagggggcgggggcgagtgcttagttgtgggggagggagccagcggcgcggtgacatcacggggctgggggcggcgccggggctgggagcgtgtgacgccgcaggccgcggcggacctggggattaatgggaaaagttttggcaggagctgggggattctgcggagcctgcgggacggcggcagcggcgcgagaggcggccgggacaggtccgtgcggatcgggagaggccagcgcggcccgggctgaggtggatggtggggtcaggggctccgagagccgctttccgcgcctctgcggctcgtctatgctcggcttgcgcgctgaggagccaccgctggggtctccaccgcagggacccctgtggttgctcggagccggcctccctccctcctcccacccaccctgatccctctaaagccccgtggcttcatctcctctcaattccaaagaaccccatgtcacctcccttctgaccccctttctgagcgcctcccttgctgtcccgctacccaggccctccttggagatccttcctgcctccctcgatagccttccatccttgccctgtcggtcagtgctctcctcctctctgacccgttttcgggttgccctatccctccccatcttctttaggatgttgtgagccagtccggtttatccgagccccttctatcctggctaccggcagaggccccacttaggctcagctctcatctcctgtccttttcacctcctgtcacccgactgcctcgcttctagttttttttttttttttttttatgcctctgcttgaggagaacccagaggtgcacgataggcttccgtttcaccttcagttgagctgggagtggggtgttgagcgccagcttgaccagatttgttcgggtcacaggtttcactgggtgttgtattgggagggatggccagttggtaggccctcgtaatctcagctttataatacttcccctttatgagtctgttgacttccaggaacccttgggggagacggctctgagttgggtgtgtgccaggggtagccagaggcttcatataactcttttcaccctttcaggaaacaggactcatttgggatattatggaatgtatttaaaccatgatacggtgccttccacgcactgcccttttccatacagctaagagcagaagctatgcccttggttttttttttttttttttttaaagatttatttattatatgtaagtacactgtagctgtcttcagacacaccagaagagggtgtcagatctcgttacggatggttgtgagccaccatgtggttgctgggatttgaactccggacctttggaagagcagtcgggtacctcttacccactgagccatctcaccagccctgcccttggttttaaacttggtttttcctccctgtactggctctagaatgtttgcttacaagttacatttatttatttctgtggggtgtggatgtggggtggggtgtaggtcagagcacagcttactggagttgggaggtggctctctcattcgatattgtggttcctggaaatagactcgggtcattaaggtatgatgacaaccacctttacgtcctgagccacttcaccagccccagaatacattcccgttttagtttttcaatggattgtgggcctgctagccctggggctgttgggcatctgttcccttaatcttggggtcttggtccagcgactgagtttacctcctgtctttcactgacggaatgtgcctcttgtgttggtcactgggcatggttcctcggtgccctttttccttccgtttcctgggcatctgtatttactgaggctgggagaggcagctgacgtttcttccctttgcccaggtgtggtctggggtattgccttggtatctgcctgggcaggtcgagggattgcaccagtgaggccttgcaaaggaacttgggctgtctgcttccaggcacagctcagttgtatgcagagttgagcctctttgtttgccttgggtccctggagtcatcctcaggagagaacatatatttatctttgaaggctctggaagtctgacccactctaacttcagaagcgggagcccagggttccgttggcaccaggtttctaggtctcctcttttgaggatcacactctctgtctttgagccagaattggccatagaacaggccaccttctggagccacagcagggagccaactgaaccagcttgaccaggtcttacagttttgtgatctttgtgtgcactgaccgttttccacgaaagcattaggactgtggctggcctggggttgagtgagcctcctctcgtctgatccctaaggcccctatatggagcactagatgtggggatgacaggagagtggaggaggttagaaggaatcttttcttcctatgagaaacatcccatttattatttatttgtgcgagcgtgggagtcagtgttctcctcctggtgtccccaggattgaacttaggtcatcaggctggttggcaagcgcctttacccactgagccatcctgtccctcctcagtatcactctgtaacccaggctggctttgagggcactgtgctagtagcctcctcactgatggcagtcttcctgctctgtcttctgagtgctggggttgctgggatataccacccaacccgggtcatttttgagtggtgcagtcgaatgcttggtaatgattagtccagtctctggctccccagagattctgcctgacagtctctttttttttttaattagatttattcattttattttctgcgtgagtattttacccgtgtaagtatctgtgcgacaccacctgtgtaccgtgtgtgtttggtgctcttggaggtcaaaagaaggcgttggatctcctggaactggagttccagctggtaactacgtgtgggtgctggcactcaaacccgggtcctctgaaagagttccaagagctcctaacctctgagccccctcttcagccccctacctacaacccttaagcagtctattattgtcctgactttgcttaacgaaccacagggctccgtgctgagttggtgcataggaggcctccagtacagcacagggccagtcctggtagagccttgtaagtcctagctagcaatgctggctggataacctcctgaggcatgtctactctgcagtcttctagggaacagctttccattctgtgcttaatgcagatcgtggctcaacgtctgttttcacggtgtgaggggacaggcccttgccagtggctttacctgtcacctccaaagttcactggactgacccccctgctctgtttgggaacttttctgtgctgtgtgcttcaagtcacccaggaaaagtagttgtcctaggtcctcccagccccacctgtggtcccttactgtcttcctaaaggcctggtgtagagactagcctgagaagctggtaggcctctattttggacagagtgcagctgcccagctgttgtgcaagctgtccccagggtttgagcttggcatggcctggtacaacgagtcttgtctctgggctgagtcctgaggcccacctccccaggctgctaccctctgcatattggggaccagtggagtgggtgcattctagtaccccgtctggtggctctggtggacctggtgatgccgggacaagccacatggcactgtccacattgggagcattcctctcttgccagcaatcacacaagcttgtttgtcctgccagggcctggcttgtgttatgtccgaagctttgtgcccagtgcccttgtctgtgccatgtcgtcccagattaccctgtggctgtttcttggagatggtttgatgtcgctgagcatgtttgtgtgtcatcggagccaggggaggagtggcttgccctagcagctggattccagggtgtcagaggagagctgggtacttggctggagcctggcaggcatatgggccttcaatgttggatttcaggcatgtgggtcttcttccatggccctcataatttggggctggtgactgggaagtgactcaggggcctctccttctgtgagctagtggggtgctaggcaccacctctttcttaccctgccagggccttccgccccacccaggtaagatccgaagagccagtgtctgcttgcttggcagtgcagactccttccaggattgggaaatatttgctgactcagggtgagatcgacagtctcccatggtgtgtgtgtgtatgtgtgtgtgaggtcatatgggaccacatgttcttgagtcctagtgttcagttagaacaccctaagctctctttttggaccctggcaccactcagttaccgacactggctcctttccaccttacagtgctgtgcagcggtgtgggtatgcgcatgggactcactcagaggctcctgctcactgacagatgaagacaaacccacggtaaaggtaagcccgcttcgcagacttgggtgtcgggctgactgccacaggctcctggccttgaaggagtcaccaggctgagtccccgatcacctgtgcggccacctgcacctattgcttacggtgacgattgctcatcgactgtgtgcggcttaggtagatcttttagcagtgtggagattctcacctttatacccacaaggatatggactttctcttgtgtctgaggggctgcttgctaaatagggtagccagtgtttgttgagtggcgtagaggatcctgggccaccagggtgctgttcatcacttccttccatttacccaatagatgagtggtgtttggtttctggatatgtagtcgggcaggtctagaactccagctcaccccttctccttcccaagtgctggaattggaggcatgtaacatcacgcttgctcaggaaaacatgtgccaggctctggggacacgatagagccgtttaatccccgcccccaggtctgtggggcaataacagggctcttccttctctgctgggtgtccagttctcagcaaaatctaacaatgccttgggcttcccacactgcttccctgttctcaggatgcttggcaggttatagaaactctcagaaggggcacaccagggagtttgatggtcattgtcttaatggcttggcaggcagggctatggtgggtccctgctgggggcaggggaaacctggccctgttttaatctctgatgtttgggggttcaggagctgtttgtgggatccatttcccttactcccgagttttacagcctgcagattttcctgttgccaaacaggagttgaccagcctgggtctggctgcctgtcacagggtcaggttgtttctggatccttccggaaggtctggggcaagagcccctccctgcagttctcagaaccacatctaacgtgggcttggtgggaagaggagacctgtgtaagatacgttcccgatatcagggagctggcaggggctcagggtgtgatggcgagtttatcttcagtcagcatcctgagggatgaagatacaggggtgctgggctctggaggcaccatgcaaaaagaacagttttcaaacttgtgatctcaataccccacacaccctactttttgaccctatgtagccctgtcctggaacttacttgtagaccaggctggcctcaaattcagagatctgcccgcctctgcctccagagcgctgggattaaaggcatgaaccacataatctagccccctctaatttttaaattacatgtatttgtctgtgtgtctgtctgcttgtgtgtctgtctgtctgtgtctgtgtgcatatgtatgtggacagcagctgcttgtagcatggtggctaggctctgaacacaaacatcccagagcgattgcactgaggagacggagctctctcgtgacctggtctcggaaatcagggtgtcatcgcctctgttcttttgatcacaggcccagttctcatcagagggaggatgacagccaggtgt

SEQ ID NO: 179 - DNA, 1865 bp, Mus musculus
ctcagaaagtccatcaaccaagaccggttcctgctgcgtctggcaggccttgactatgagctagcccacaagccaggcctgggagctggggaccgagcagagctggtggaggtctgccgacctgggcagcaccgagcaggcaccaagtgtgtcagctgcccgcagggaacgtattaccacggccagacggagcagtgtgtgccatgcccagcgggcaccttccaggagagggaagggcagctctcctgcgacctttgccctgggagtgatgcccatgggcctcttggagccaccaacgtcaccacgtgtgcaggtcagtgcccacctggccaccattcaggagatgggtttaagccctgccagccatgcccccggggcacctatcagcctgaagcagggcgaaccctgtgcttcccctgtggcggaggcctcaccaccaagcatgagggggcagtctccttccaggactgcgacaccaaagtccagtgctccccgggccactactataacactagcatccatcgctgtatccgctgtgctgtgggctcctaccagccagatttccgtcagaacttctgcacccgctgcccaggaaatacaagcactgactttgatggctcgaccagtgtggcccagtgcaagaatcggcagtgtggcggggagctaggtgagttcactggctacatcgagtctcccaactacccgggcaactacccggccggtgtggagtgcgtctggaacatcaaccccccacccaagcgcaagatcctcatcgtggtccccgagatcttcctgccctccgaggatgagtgtggggacgtcctggtcatgagaaagaactgtgggtgcctgcagagccggctgggggcctccccatcctctatcaccacttacgagacctgccagacctacgagcggcccattgccttcaccgcccggtccaggaaactctggatcaacttcaagaccagtgaggccaacagcgctcgaggcttccagattccctatgtgacctacgatgaggactatgagcagctggtggaagacatagtgcgtgatggccggctgtatgcctcagaaaaccaccaggagatcctaaaggcaagtgagcgttcgctgtggtgcggatggaaatgggacaagaagcttatcaaggccttctttgaggtcctggcccaccctcaaaactacttcaagtacacagagaaacacaaggagatgctgccaaaatccttcatcaagctactgcgctccaaagtctccagcttcctgaggccttacaaatagtgcctgtgggcccgagacccagttcagagctcccacctccctggccctcagagttggcaccccaacctcagacaagaaactgtctctcttgaaggagagatatcaccacaccaggcgctctccctttcggcctttctagttaccttgtcttcgttctgtctctctcctggaagtcattcagtgcgtctctgttccccccagaggtgaaggaatagacaccctctattcctctgccgttatagcatggtgccttgctagccaggagccaaaacaccccctccacagcccccgtgctccccagagtgggtcttcacagcccagagtcctgccaaagaagccttggacatagcagctttgtgccagcatcaggctgctggggcacagagtttaagcccggggtgcccacacagttggcgttctcatctgtagagcttgctctcatctggccggggctgactccatagggtttacaagtgatccataccaatgggatagcaaacccctgccgggtaagggcgaggagcaggcaggggccctggacatataaagctctcagatagctctgcaggacagaaagc

SEQ ID NO: 180 - protein, 422 aa, Mus musculus
LRKSINQDRFLLRLAGLDYELAHKPGLGAGDRAELVEVCRPGQHRAGTKCVSCPQGTYYHGQTEQCVPCPAGTFQEREGQLSCDLCPGSDAHGPLGATNVTTCAGQCPPGHHSGDGFKPCQPCPRGTYQPEAGRTLCFPCGGGLTTKHEGAVSFQDCDTKVQCSPGHYYNTSIHRCIRCAVGSYQPDFRQNFCTRCPGNTSTDFDGSTSVAQCKNRQCGGELGEFTGYIESPNYPGNYPAGVECVWNINPPPKRKILIVVPEIFLPSEDECGDVLVMRKNCGCLQSRLGDSSITTYETCQTYERPIAFTARSRKLWINFKTSEANSRFQIPYVTYDEDYEQLVEDIVRDGRLYASENHQEILKASSLWCGWKWDKKLIKAFFEVLAHPQNYFKYTEKHKEMLPKSFIKLLRSKVSSFLRPYK

SEQ ID NO: 181 - DNA, 4447 bp, Mus musculus
tcccaccaagcccctgtcttcacagatgtggatgagtgtgcagagggcaacggtggctgccagcagagctgtgtcaacatgatgggcagctacgagtgccattgcagagatggcttcttcctcagtgacaaccagcacacctgtatccagcggccagaagaaggaatgaactgcatgaacaagaaccacggctgtgcccacatttgccgggagactcccaaggggggcattgcctgtgaatgccgccctggcttcgagctcaccaagaaccaacgggactgtaaattgacctgcaactatggtaatggcggctgccagcacacctgcgatgacacggagcagggtcctcggtgcggctgccacgtcaagtttgtgctccacaccgacgggaagacatgcattgaaacctgtgctgtcaacaacggaggctgcgacagtaagtgccatgatgcagcgaccggagtccactgcagctgtcctgtgggtttcatgctgcagccagacagaaagacctgcaaagatatagacgagtgccgcttaaacaacgggggctgtgaccacatctgccgcaacacagtgggcagcttcgagtgcagctgcaagaagggctacaagcttctcatcaacgaaaggagctgccaggatatagatgagtgctccttcgaccgaacctgtgaccacatgtgtgtcaacaccccggggagcttccagtgtctctgtcatcgtggctaccttctatatggtgtcactcactgcggggatgtggacgaatgtagcatcaataagggaggctgccgctttggctgcatcaacaccccaggcagctatcagtgtacctgcccagcaggccagggccgccttcactggaacgggaaggattgcacagctggctgtgggctgccttgcctccgacagcggatggaacggaggctgaaagggtccctgaagatgctcagaaagtccatcaaccaagaccggttcctgctgcgtctggcaggccttgactatgagctagcccacaagccaggcctgggagctggggaccgagcagagctggtggaggtctgccgacctgggcagcaccgagcaggcaccaagtgtggggagaagctgcttgaagggcaagtgatccagctggaggacgggaccactgcgtacattcaccaggtgacgatacagaaagagtctttctcctttgaagatggtcagcccgtgcagctggaagacggcagcatggcctacatacaccacacacccaaaggtgggcccgtgggcatcgtggctgagggctgtgaccccagcgccctggaagctgtccagctggaagacggttccactgcctacatccatcaccctgtgcctgtgccgtcggacagcgccatcctggctgtgcagacggaggcgggcttggaggacctggcagcggaagacgaggaaggcttcggcacggacacagtggtggccctggagcagtatgccagcaaggttctgcacgatagccctgcttcccacaatggcaaagggcagcaggttggagaccgagctttccgctgtggctacaagggctgtggtcgtctctacaccactgcccatcacttaaaggtccacgaacgagctcacacaggggaccgcccatacaggtgtgactttcccagctgtggaaaggcctttgcaacaggctatgggctaaaaagtcatgttcgtactcacacgggtgagaaaccatacaagtgcccagaggagctgtgcagcaaagccttcaagacctcaggggacctgcagaaacacgtgcggacccacacaggtgagcgcccattccggtgcccttttgagggctgtggccgctccttcaccacatcaaatatccgcaaggtacatgtgcgcacccacacaggcgagcggccctacacctgccccgagccccactgtggtcgtggcttcaccagcgccaccaactacaagaatcatgtgcgcatccatacagtgtccccaggggagaagccatacgtttgcacggtgccaggctgcggaaagcgctttacggagtactcgagcctgtacaaacaccacgtggtgcacacacattgcaagccctacacgtgcagtagctgtggcaagacctaccggcaaacctccaccctggccatgcacaagcgcagcgcacacggggagctggaggccacggaggagagcgagcaggccctgtatgagcagcagcagctggaggccgcctctgctgctgaggaaagccccccacccaaaccaacccacattgcttacctttcggaagtgaaggaagagagcagtgccatcccaacccaagtagccatggtgacggaggaggatgggccccctcaggtggctctgatcactcaggacggtacccagcaggtcagcctgtccccagaagacctgcaggccctggggagtgccatcagtgtggtgacacagcacggcagcaccaccctcaccatccccggtcatcatgaagaactagccacatctggcacacacacggtcaccatggtcagcgctgatggcacgcagactcagcccccgtttgcatttcctgaaaccggatcttggtgtcagagccgcccctgggccggggcgggcgcctcagccatggccctgcgcaaggagctgctcaagtctatctggtacgccttcactgcactggacgtggagaagagcggcaaggtctccaagtcccaactcaaggtgctgtcccacaacctgtacactgtcctgaacatcccccatgaccccgtggccctggaggagcacttccgggatgacgatgatggcccggtgtccagtcaaggttacatgccctacctcaacaagtacatcctagacaaggtggaggagggagctttcgttaaggagcacttcgatgagttgtgctggaccctgactgccaagaagaactacagggcagatggcatcgggagcagcccactctctaatcaggatgctttccgtctatggtgcctcttcaacttcctgtctgaggacaagtacccgctgatcatggttcccgatgaggtagagtatctgctgaagaagctccttggcagcctgagtttggagatgggcctgggcgagctggaggagctgctggcccaggacgcccagtcagcccagaccgccgtggggctcagcgtctggcagtttctggaactcttcaactcaggccgctgccttcggggtgtggggcgcgactccctcagcatggccatccaagaagtctaccaggagctcatccaagacgtcctgaagcagggctatctgtggaagcgagggcacctgcggaggaactgggccgagcgctggttccagctgcaacccagcagcctctgctactttgggagtgaggaatgcaaggagaaacgaggcaccattcccctggatgctcactgctgtgtggaggtgcttccggaccgcgaaggaaagcgctgcatgttttgtgtgaagactgccagccgcacctatgagatgagcgcctcagacacccgccagcgccaggagtggacggccgaggaggagcgccgccgtagccagcacaaggagctgcagcaggctctggagggccagctgcgggaggcggagcaggcccgggcctctatgcaggctgagatggagctgaagaaggaagaggcggcccggcaacggcagcgcatcgctgaactggaggagatgcaggagcggctgcaggaagctctgcaactagaggtgaaagctaggcgggatgaggaggccgtgcgcctcgcccagaccaggctgctggaggaggaggaggagaagctgaagcagctgatgcatctgaaggaggagcaagagcgctacatcgagcgagcgcagcaggagaagcaggagctccagcaggagatggcgctgcagagccgttccctgcagcacgcccagcagcagctggaggaagtgcggcagaaccggcagagggcagacgaggacgtggaggctgcccagaggaagttgcgccaggccagcaccaacgtgaaacactggaatgtccagatgaacaggctcatgcatccgatcgagccaggagataagcgacccaccaccagcagctccttcacgggcttccagccccctccgcttgcccgccgggactcctctctaaagcgcctgacccgctggggttcccaaggaagaaaaactggatccagcaccagggaattagctccgaccacccccttgttcttccgatgctgtgtctacggacttggccacagcaggcctgtgggtgattcctggtgctaccacctgccgaccaaaagccgatcaaggattgaactttcaaggatctgggaccagaactgggaaagaaaaggaatgaccaagacaagatcatacgcccctccctccagaccaagttatggagacatacttccaaataaaactgctcacaactgcccactgc

SEQ ID NO: 182 - protein, 1475 aa, Mus musculus
  VARIANT (1)...(1475): Xaa = Any Amino Acid
SHQAPVFTDVDECAEGNGGCQQSCVNMMGSYECHCRDGFFLSDNQHTCIQRPEEGMNCMNKNHGCAHICRETPKGGIACECRPGFELTKNQRDCKLTCNYGNGGCQHTCDDTEQGPRCGCHVKFVLHTDGKTCIETCAVNNGGCDSKCHDAATGVHCSCPVGFMLQPDRKTCKDIDECRLNNGGCDHICRNTVGSFECSCKKGYKLLINERSCQDIDECSFDRTCDHMCVNTPGSFQCLCHRGYLLYGVTHCGDVDECSINKGGCRFGCINTPGSYQCTCPAGQGRLHWNGKDCTAGCGLPCLRQRMERRLKGSLKMLRKSINQDRFLLRLAGLDYELAHKPGLGAGDRAELVEVCRPGQHRAGTKCGEKLLEGQVIQLEDGTTAYIHQVTIQKESFSFEDGQPVQLEDGSMAYIHHTPKGGPVGIVAEGCDPSALEAVQLEDGSTAYIHHPVPVPSDSAILAVQTEAGLEDLAAEDEEGFGTDTVVEQYASKVLHDSPASHNGKGQQVGDRAFRCGYKGCGRLYTTAHHLKVHERAHTGDRPYRCDFPSCGKAFATGYGLKSHVRTHTGEKPYKCPEELCSKAFKTSGDLQKHVRTHTGERPFRCPFEGCGRSFTTSNIRKVHVRTHTGERPYTCPEPHCGRGFTSATNYKNHVRIHTVSPGEKPYVCTVPGCGKRFTEYSSLYKHHVVHTHCKPYTCSSCGKYQTSTLAMHKRSAHGELEATEESEQALYEQQQLEAASAAEESPPPKPTHIAYLSEVKEESSAIPTQVAMVTEEDGPPQVITQDGTQQVSLSPEDLQALGSAISVVTQHGSTTLTIPGHHEELATSGTHTVTMVSADGTQTQPPFAFPETGSWCQSRPWAGAGASAMALRKELLKSIWYAFTALDVEKSGKVSKSQLKVLSHNLYTVLNIPHDPVEEHFRDDDDGPVSSQGYMPYLNKYILDKVEEGAFVKEHFDELCWTLTAKKNYRADGIGSSPLSNQDAFRLWCLFNFLSEDKYPLIMVPDEVEYLLKKLLGSLSLEMGLGELEELLAQDAQSAQTAVGLSVWQFLELFNSGRCLRGVGRDSLSMAIQEVYQELIQDVLKQGYLWKRGHLRRNWAERWFQLQPSSLCYFGSEECKEKRGTIPLDAHCCVEVLPDREGKRCMFCVKTASRTYEMSASDTRQRQEWTAEEERRRSQHKELQQALEGQLREAEQARASMQAEMELKKEEAARQRQRIAELEEMQERLQEALQLEVKARRDEEAVRLAQTRLLEEEEEKLKQLMHLKEEQERYIERAQQEKQELQQEMALQSRSLQHAQQQLEEVRQNRQRADEDVEAAQRKLRQASTNVKHWNVQMNRLMHPIEPGDKRPTTSSSFTGFQPPPLARRDSSLKRLTRWGSQGRKTGSSTRELAPTTPLFFRCCVYGLGHSRPVGDSWCYHLPTKSRSRIELSRIWDQNWERKGMTKTRSYAPPSRPSYGDILPNKTAHNCPLX

SEQ ID NO: 183 - DNA, 56181 bp, Homo sapiens
gccagcctggagccacctacctctggcctcaggctgtgggcagcaaaaggaatgtgtgtgcacttggcgagcctcctgcccaccctgtccacacctaataagtgcaatcattttgagtctttctatgttgtctagacggaggggtttttgttttctgggtttgttttttgtttttgtttcttcttcctctattagcaaaaccctatttatagctgcccaagagaaaagagtgtatgtttggagtggaagaaaatcggttttgaatctcatgaaccttgagtgctggagcatctgatctgtctctatgccaccactggccacctagagcccttggctgtggtaatccagggtaattgcgcagaggcatctgatgtgtaggaaagtaattctggggatttgatggagcagaaaggagagagacctatgtttgctaaaccaatcttgctatccctatgcctctccatggagtcagtgtggacctcatgattatagaggccaatggaactggtcagtgattctctaccccaagtagggaaaacctccatcttttccctgtcttcatcctgttatcccctggtgtacacatggaagaggaccaggacataccacctggggatgggctgactcagggtcccgaggccagagacaaagctgtgggagccaagaataagacagaaggcatcagatatttgcctggctctggtcacttccctttgaagttgacttcaagcttagcttcctcaactactgtttttcagaaggaagaaagaatcaaatggaagaagaatcaagtccatgcccaagcccaaagcctgcacacattctgcccttaatccaagtgttgcctataaaattattttctgttttctcactctagttcccccaaagctgtagtcccaatcaatcaaaggctaccaactgagtcctcaggttcatttcttttttttttttttttctttttaactctcctggtaactcacagaacagctcaggttcatttctaggtgactgtcctaggctactgctcccccaggagactcaacactaaataaaggagtctgactccctgccctcccatcagtagcattcatcagccaaaacggccatagcagtaggtagccaatgacacagctagattccctgacaaccattagccaacatcatggtccttgtgggtagagtgtctggctacctttgtctttctgggtcaaggagggccactgtaaagatgcaaaatggctgcttccaaacaagggaaatggtcatttagtatgagtgtctctgtacttcccaggaagcaccatgaaaactgctttaatcaactctgactatcctaattctccaccagaagctaggataactttctttctttctttcttttttttttttttttttttgagatggagtctcgctctgtcacccaggctggagtgtaatggtgctatctcggcctactgcaacctccgcctcccaggctcaagcaattctgcctcggcctcccaagtagctgggattacaggcatgcgccaccgcgcccagctaatttttgtatttttagtagagatggggtttcaccatgttgcccgggctggtcttgaactcttgacctcaggtgatccacccgcctcagtctcccaaagtgctgggattacaggcatgagccaccgcgcccagcctaggataactttctgattcctctctgccagccgttttgcgtctcttggaaagccaaacggtgaccatgcttcttaatttatgccttcagggtctggcttctcctttctcccttcctttcctgtcacaccatgcatacatacatacaaatacacatccttcaaccatttattccatggcttatgagacctgcaaatgagttccacagtacggaaggcatagaccactaggcttcttaattgatgtcaaggcagatcttggtgagcaggtaaaaacctgctattgtccaccaagtttaatttaggtcctccaagttggagggttaagaacccaggcaaagctgctgctgaatctatggaggaggctggccctgggacatcaaactaggggttaactggattgaatgaggagtcaacgctcagggacattctaggtctttacaggtcagacagaagagaggtttttaccattggagggaaatggaaagatggtataaataggatcccttcatgaagcaacccagaggcctctctgcagcgtgtagggtgtggggcgacagtattgtggggcttccattcatcttagtacaaaacctcacctgctctgagcctggaaatgggagggcttcacgcaccaagtaatgcacaccagaaaggcacttatatcctcagcaacatggcagttcctctttacttctctgcctccctctttctatattatcaggccatgcctattcctacaacctgagacaactcttggagtcagaagaaaactgaccagatcctggatctgagctgcctgctccaggcctagaaatccccaaaggctggcactgagctgtgactgctttaacagcccccaagatttggtcagtttgaggtggtggagactcagatttgttgctgaaagttcagtaacacagtcctggtctttggccctagagaaactttttatatgagaagtgttctctatatacatgtttgaggtgactctggaatggattatgaggtcatatctcaaaatgtcagaaaacgttatagagcactcgaacttttgtatttgctgcttaacctcaatattacagccacaaacaaggggtaccaagacaaagtataactgagcataagcagaaaatgttaaccctccaggtttctttcttaagcacaataaaagtgggagcgaacaacacaaggatatttttacatttgacccgtctcaaaagtagcacaccctatccttgtgccattatttgtacaaggaaatatatgattagaaggaatagaacccccagttgtcatcagcttttttagacaccacaggttgtagcagtttgaacaaactgaaaactttatacttctgtgtgagctgaactcaagtttcagaataatcatcgccatgtgggaggctttttgttaaatgcagaagaaatttcaaaatattgtatttatatctgccttccactgctgccaatttagtaagcatctcctatacaatcgacaataaacagcaaatgatgcagttcatagagtattttgcacttggggaaaaatatgtatctgaattgtaaaaagaaatgtttggattttgtatgtcttttttattattattaaaatactaaatgaaactcctcagcccggcatcttttcctctatctcaatagcttatcccagagccagaaaaagccttgaggagacaatgtcttctggcttccagataaaacttaacccaaattttttggcaactcatccctaatgattttaaaatttgaaaaggcttgtcttttctctgtccttaaaagcagcatcaagtattatctcctgagggggatctaaggagtgggggaaatttattgttcctcctctccacagtacagtccacaacagctggccagcccacaggtggttcagcacctccctactcaggatgtcccacctctaggaaagcgccagcactgagggtcacccagtgtcattctttgtatgcagtacactcttagccaccaaatagtattgtgaaatacagatcatttagtcactaccaccatcactactcctacagggcaggagaaagcaatctccaatctctattataaatgaacagtcccaatttctaggctcagagatatagataaaactttgctgttgcaattatataattccctttcatgaaattttattggatttaatatctacatgatatagccatttaagagtataacttgagcaacaaggaaaaatctacctgatcaaaaaacatgtggggtggcctatcagaatcttaaacttaccctttagcatctataatgaagatacagatgaagtacattcattccataattactgagatcctattatatgccaggtagtgagcacctgctcatcagcttattgacaatagccatgctcaagatccacactcctcatgtaactttctgattataattgatcttcccagataagatttacccaacaggagcgataatccagttcacttggtggctgtaagtataaaagaatgcactggcattctattatgtacattaacttcctatgagtttgatttaatgtgacaaaacatgaacacctttgtgtggactgacccaaaatcacacttctagaactgcaaagccaaggaccatatccatgaccttcacactataccaacttggagccatcctctttgacttctctcataactcacttctattctaagaacaacacgtcttcctccttacttcgtaggacatttgctttggtgtctcaaaataatggatagtcagggacattggagtttggatatgcctatattaagaagtcttccaagtggggtaaatgaagatttttcctagggtacgtaagactgcaaggaatacccaggaaatagcctcaaatcagtctgaggagagttttaaaggaataaatttccagatcctcaacttccctataaaatattttctaaaaccaggccgggtgcactggctcacacctgtaatcccagcactttgggaggctgtagcgggcggatcgcctgaggtaagagtttgagaccagcctggccaacatagtgaaaccccatttctactaaaaatacaaaaattaaccgggtgtggcagtgcacacctgtaattatagctacctgggaggctgaggcaggagaatctcttgaacccaggaaggggaggttgcagggagctgaattgggccactgcactccagcctgggtaacagagcaagactccatctcagaaaaaaaaaaaaacaaacagccgggcatggtggcaggcacctgtaatcccagctacttggcaggctgaggcatgagaatcgcttgaacccaggaggcggaggtggcagtgagccgaggtcgtgccactgcactccagcctgggcaacaggagcaaaacttcatctcaaaaaacaaaaacaaaaacaaaaaaaacggccaggcacagtggctcatgcttgtaatccccgcactttgggaggccaagacaggcagatcacaaggtcaggagtttgagaccagcatgaccaacaaggtgaaaccccatctctactaaaaatacaaaaattagccgggcgtggtggcacgcgcctataatcccagctactcaggaggctgaggcaggagaatcgcttgaacccgggaggcagaggttacagtgagctgagatcatgccattgcactccagcctgggtgacagagcgaggctccgtctcaaaaaaaaaaaaaaaaaaaaattctaaaaaccaatccatttgggagccagctgacatattcatgcacattctccactctaccactgcccccactttcaccatagtccttgtcctactttacaaaagaaaggaatgtctctcccctacactgaatcttgatgcatggtccagggtgtaaaaacctgaggagctgggagggagcaattattttccacttcatatcaaaatattcccattgcaatcagtcttcctattttatcttatataaaatgtttattattttctacctcctagtaaaaagtgaaattgctagctgctcaattcattatttcttagcaaatacagctttcctttctaaaaaatacagaagaaaaaaatttgtgtaacaagattattagttatttctgatttttagacatgattctcatttaattgttcccaaaagctgaacaacaagagtttgatgaaagcaggcacacacatttaccaagggaatatatgccttctatatgacttctcaaaactgatggatttaactatacattatacagcattattcctaattatataatgaaaaacagtactatcttatttttaccatttattatgttaatagtaggtctaaataattttaatcttgactggtttatcagtggtccattttataagctatagttaatcatttatttcctaataatttttataatattcctcaaaatgaatgttaacatatttatttgaatggaagaataaagtcagacatgtttctaacagaaagtaggtctgatttggctgattggtttgaaatgaaaactggctttgccaattccacaaatggcagttgttttctatacagtgaatgagctgaatctgcatttcagtttaacaaaaagttcttgaagacatgtaataattaaagaattttaccaaaaaatattgtgtaggcaaagaagtatggaaatcaatatctgattaacaaagtgtctctgagtgtaaaggtcacagataattaataatcatgtttaataaaaccaaaactgagactctaataactaaatccttttggaagttcagtggtttctaatcctttgcttttaacaaaattaaaagaagactctatttgatagtattaatagatcactctgtgattgttggcatataatttagaagttcaaagactcaaagaatatcattgtaacaaatctcttcctttcccaattgtggaaacaaggtttctcaatactcatgtctataaaaataaaaaacaggtaaaggattgatgttgcaccttatctccttctaccattaggtaatattaatccatgaatacctgaactaattggggagaaacaccatatttctcattaacagatgcattttcaataaaaattgtactttttaggtttcacaagtcataaaaatgttaaaaatatttaggaaaatttagtatttagtaatatttagtaaaaaaaaaaagtttagtaagttatatactaatgattacaggaagtgaatggaattcaaagtataaggagaaagagaaccatataaaatttctgttgaagagcttgttcatatatttttaagtggatgatggtaggcattagatttttagggtacttggaatccaccggatacttttttttaatgtgagacagtctcactctgtagcccaggctagagtgcagtggcacgatctcagctcactgcaacctccgcctcccgagttcaagtgattctcctgcctcagcctcccgagtagctaggactacaggtacgcaccaccatgcccgcctaatttttgtatttttagtagaaacaaggtttcaccatcttggccaggctggtctcgaactcctggcctcgggatccgcctgtctcagcctcccaaagtgctgggattacaagcatgagccactgtgcctgccctgccagatacattaagaatgatgtagaccaagtgtggtggctcatgcctgtaatctcagcactttgggaggccaaggcgggcggatcacgaggtcaggagatcgagaccatcctggctaacaccatgaaaccccgtttctactaaaaattagccaggcatggtggcgcatacctgtagtcccagctactcgggaggctgaggcaggagaattgcttgaacctggaaggggaagttgcagtgagctgagattttcgccactgcagcactccagcctggttgacagagcgagactccgtctcagaaaaaaagaatgatgtaagtcttagtttaagatgtcaaaatttgaaattgtatcctctataagtatttaaattaatgaaggaaaatttaggtatcaacttaaaaatgaacaagaggtacatagctcttcaaaattcttttatgggttcattctaaaaaatgtctgaagatcaccagcctatatgttgagtggaagggataggagagaaactgctagcaatggtcttcaatactgccctccaaaatatcctcaccaattctcctgagaacctgaaattaccttccattaggatcattacttcagattcagacactgtttcccagagctcttgttaaatgtataattgcagaggtgactggccatcagattacgatccgtaaggaatgtgagaaaagacagatatatatatacagagagagctatggaaaaagggtggttggagagggacaaactcaggtacagcctgagttctattccctgcggtatttctaaccctcaattcatattataagaggagctacttaatcttctctctgtatctataaggtactttttctttttctttttttttttctttttttgagacggagtcacactgttgcccgcgctggactgcaatggtgcgatcttggctcactgcaacctccgcctcccgggttcaagcaattctcctgcctcaacctccggagtagctgggattacaggcgcccgccaccacgcccagctaatttttttgtatttttagtagagagggggggtttcactatgttgaccaggctggtctcgaactcctgacctcgtgatccgcccgcctcagcctcccaaagtgctgggattacaggcgtttaagccacggcgcccggcctataagttattttctatgggaaataacttgtcaaacttccaccaaaaaggaatggaaagagggcagcatagtggccaggcagtttatttccatactaggagatacagaagggattaattctaaccgtaggaattctaaccatcaaatgtcactcactggcctacctaaactgaactctggtcccagccagaacaagtcaggaagaggggatgtctaagaccgaaaggggggctttctagttaagctcttcaggcaggagaggaaaaggatgcccgcatccccaaagacacctttagctaccacaagccccaaaccccgtactttgtaactgtgtctagtttacgtcctttaaaaattattcttattaagttaaattgttttcggggcggggaagatacaaaagaaaccagttaaagtctgaaaggatagagaggggaaagtttctcacctcattcttccagccacccagttcctctcctaaaaggcaatctttaccagttccttctctaacgcccctcctttttaatttgattttttaccgaaagctcgctcccttttaattttccctcaggtttctgaaaatttcccaatcgcagcccctcccagcagggaaatagtaaaggggcttggtttttatgttcaacccaaagcaagcctacaaaagggagtagtcggtttcgagcctgacggtggagctgacgcgggaatgagagagaacctgagaagaccgccagggcgccctccctgcggaggcgagtccctcaccgcccctctacatcgtccttttcaataaggagctcttaatacctgcaactgcttccttcaaggggtggctggaagatcagtaggcaaggcctgcggactgcgcaccttaaagcgcttcgggaccgtaagacagtgagtgctgagcgcgcggccgggaagaagcctggaggctctgagctcggaggacagagaccgaagccccagggcctgcgtccctcacaacctgcgcctcctgtcctcccgcgctactcccgaagcgcaccttctcgcccgcaggccgcagaagtgatgacgcaaagccctcggggcctccgccacctcctcacgcttctgctggaccgaatccttggaatggacaggtagcggttcccgattgctatagcgacgacccggctccgagccgcgcccaggccctgacccgggcgtcgtgacgtcagcacgccttccctgggcgctcagcctcgctggccatgcgtcaccccggccttggtgggggcggggctccgaagagctcggttcagatcccggccgcctgggctccaggagccccggaaccaggataagttggatggctgccgcggcgaagcggggggcggggtggaccgtgcccggtattttctatacgggttccggggcccggtagaggcgcgccaagaggaaaggaaagtgcggcggccctggaacctggatatcgcgcgaggcaagctgcgcgcgggcgggcgggctatggcgcaggcgggttgtggggccggcgctggtggcggggcccggtgcatggcggtctgtcggcggagtcgccctcgggggctgtcaggttggtggctgcgggaggagtgggccaaccatgcccagggcgggaggccgggcgggcgcaggaccccgggaaggtcccgagcccggcgtgcccacctccctccggccctagcagggcggcctggccgctggaccgcggccgggccccctcccccacccagggtccctgcccctcttttccgccttgcggctcctcccccgtgactcccaaacctcaccccgtgacggcgcccgcctccacccttgtgaccccacaccccacccactgaccccaagacctcaccaggtaaccgttggttattattcattggctgctaacccaggaatttccccagcacttctcagagacccaccaaccagtgactccctcagttttaatccggtgactcacatgaccctgagatccccacactcctccttagtgacccccaaacctgggtaaccctcctggcccagtaacccccccgattctaccttgtgttccccacaaactcggtgactcccctcaaaactctgctggcgactcctaagccctactccaatagttttccacgcactcaccttgtacacaaccctcagtatctttatcctgtagccgtatgaccctcgttccacgtctgcctttatcctaaaatcacccccactggcatctctctctgcgatcccagcccttcagtgtcaatcagcacatgacttacaagcgtccagcacctttctggtgctaaggaggatatagagattaatatgaagtagtaataattggaggcatgagagaattctggatcaatccagaatccagtcaatccagtgtgtggtcccagctctgtcactgctgtgctttagggacctgtgagaagtcccctcctcagtctggacctcagtttctcatcatgactgtgatgaggttgggttagatgatctttgagtttccttccgtctgtgaaattgtgaaattatgcagttctcagtcaagataataattttttgcaatcatttttgtaccccaccctggaaatttcctcttgtaacctcatcccaggatctgcttgcatcatgaaccttactccctcattcccggatcaccctcttcactcttcatagtgcatacccatttcccttgatcaggccccatcagttaacatgtttgcaaagcagtatagcagagtgcttcatttgggggcattgagttcataacaaacctaggttccagtctgattctggcccttcagctatgggacttttggtatattatttagcctgtcttaacttcagtctccacctctgcgaagggagaaaatagtagtgcctgacataacatatgtaaagcaccgggcaccatgcctggctcatgggaacccttagcataagctgttgttagaaatgagaagctgctatggatcttactctgtcctgagtgctagggatttaacagactgaacatgtggcccataccttgcattatgttgctactactgacatcttggaatccctatcttctcatctctgctgtagcctcacttctctggttcttaccctgattttgcctcaataacgattggcttgctgaatacctactgtgtgccaagctctggatatataagttaaatttacgtctcaacagccccaagagttaattattattatatccaccattttcccttcccatatttttgtttggttggttggtttcagagaaatgaaccagaaactctcacagctaagtagcagagctaagatttgaacccacagtttaaaaaaacaaaacaaaaccctactccattgcctgtctttcccccagacttactcaacctcagctccttattccttattttctagtaattcctaaatacaacatcagctcgttccttgatccctaaggtttctgttcttgagctcctagcctcaagagatcctcccaccttagcctctcaagtagttgagattataggcgtgagccaccaagactggccctgacccccaaggtttctattaccgtttgccatgtaacttggtgactttctcatcctgctgttcatgacttttgatctcatatcccctgaagcccctgcaccttgtaggggagggaaaatatcttcttaggttcatggcttaggcccctataacaacagatttaataagagaagattatatacatttatttaatgtaagttttatgtgacaggagccttcataaggaaatgaagacctaaagaaatgattaaacttgtatatttttatactagatctgatgaagagtggatagttgtggaaaaatacaaaaagggtaatatcaaatagtaataaactgggagaaacttagcaaggcctgtttgttcagactcttctctgtgtccctgtgtcttcacagataagggtgcttctttcctctgagtatagggagggcacctctttatgagggtattatgacctgcttcaggggaaagtcagaaaaatccttcctaggttttgtgatctgcttcaggggagaagagcctcagagaaagtgagagtgaccttcctactgccattttctcaagttgccatattttggagtagtgtcttgaacccagtcaacttctctcttcatcctttgcccaaatatctcttgttctatgaatctttgacgcttccagccctttccctgtgaactcactcaccatacagtgtctcccacctcactggcactttaccccaaatcctttcatcttgttaagtcccttagccccaggaatccacaagtctgtatgctctaaaaccatctagcccagttgcctttcatcctattttttagtctcagtgttctactcccaccaccccaccttctgccatcctcagccacattctgtgacctgaaaccttcatataatttgtccttcatttagtgacctcttgatgtgactagcttcaatggaatctgctccttccatcccagcatgaagcaatcctgtataacttgcacaccctcccattctaaggcctctcctctcatacccttgcccagtatcctgtgagatcctgcctctcagattcctccctcaccttttcaaacccggattgtctttcacccttccacagggcctcctcttcctgccttcctcttatttgtcccctcagccatcctcacctcaccaatcttgataattgattacaatataaatctcccttccatctcaggtctgctcctttcttcctccactctcttgtgcatctatctccagggccatgcgtatgcccctgctgctttcagctctgcttccttcatatgctgcactgttccaccaaacttcatcagtctcttcggtttatccagagaactacactcttctctgggaacttctgatgacttctgataatagatcaccaaaggatcttggttttttagagggcagggagagagccctttgaagtccttcagaatcaatctagctgtgtctcctggacaccctcccactatcctatcctgttatgaagctgcttgctgtatatgccctcagagtagaatgctttgggtgtcagcttctgcaggcactgaattagccccatggttttccaagccctgggaaaacttgataatccccaaccactgaagtctgaagagtcagtagcaaaatgtgacatcaaagatccacatccaaaagtctattctgtgggtcaccaaattcccaggtctcttataatgtacttattggctgtgcagcaataaatacagcagaaactaaaactagagttgaggaaagggtataccctgggttctacaactgctgtgggtggattttaaaaaggagttcttgccttagatttgtttacttagggcacagaacttattctgccttgtatttgagttatttgtgtacttttctcaaccccactctgtgagctctgtgagaacagagactaggttttcttttttcttttcttttcgagatggagtcttactctgtcacccaggctggagtgcagtggtgcagtcttggctcactgcaacctcctcctcctgagttcaagtgattctcacacctcagcctcccaagtagctggtgttacaggcgcctgcaaccatgcccagctaatttttgtatttttagtagagacagggtttcaccatgttggccagactgatctctaactcctgacctcaggtgatccactcgcctcagcctcccaaagtgctaggattacaggcatgagccactgcacctggctggttttctttatcttctgtcttcatctcttccctcacatttagcaggtagtcagtacttacctgttggattaaattaactcactcagaaattctgcatcaggtgtacaaaagtaaaagcagttcatgtctacattcattttgtggacacaacacccctccccaaagttctccaaacatgataatgggcatgtcccttgatttaaacgtcggtaatttagacacttccttttttagtcattgctcgggtgggggaatgggtgtaagtgcttttctttttctactgtatttctggtaagataggttgtttgacgcagttgctcaaatacagtggtaacagcatcaggggctgtcttatataaatctgttctcaagaaaacagctagtttgaaatatttagtgtgggttgcagagacgattaaggaacagaggaaaccaaggaggcaaaatgttggtaatttttgaagttggataatgggttcaagaggttcattataccattctttccatttttgtgtatgttggaaatccattataaaaagattaaaggcaggggcagctaggtgaacaagtgcaaatttagcactgttccttggaaaacacctcagagcaaatgagctactgtttctgaatcagtactgttatctaggttaagtagtatatttagtcctaacctttctctgacctcttctgtttgtgagatatcaggatgctaaatttaaaaattagcaccctgcagaattctgtacctagtggcctgggaattgtaacatcctggcatcaagcacctgttgcactgcttctcagcttaggtatggtttctggtggaatagggctggactggacctgagaagagggtgaggcagtaaggaggaaagagggactgagggctggagagagaccagagctctactagggtcttccccttcttgcctaaaggtttcaagttactgggagatcctaaaggtatatatattcattcattcactgattcattcatcccacaaatatttggtgaatatctgctgtgtgccaggtacttttctaggtactgggaatagagcagtgagctcactgtttgaggaatggacagggtagagacagacaataaacaaataagtaaaatatatattgagaaaattaagcagagaagggagatagaaagtgccaggagtaggccaggtgcagtggcacacacctgtaatcccagcactttgggaggctgggttgggtagataacatgaggccaggagtttgagaccagcctggccaacatggcgaaaccccagctctactaaaaatacaaaaattagccaggcgtggtggcaggcacctgtaatcccagctactcgggaggctgaggcacgagaatcacttcaacccaggaggcagaggttgcagtgagctgagatcacgctgctgcactccagcctgggcgacagagcgagactctgtctcaaaaaaaaaaaaaaaagaagaagaagaagaagaaaatgccaggattctgggtgttaaaattttaaatagggtagttgaagaggttcccactaaaaaggtaacatttgagcaaagacctgaaggaagttagggggtaagtcaagcatacatctaggggaagtttattccagtcaggaagaacagcaaacacaaaggccctgaggcaggaatgtgccctatatattcaagaaacatgaggaagccagccaatacggctgcagtatattagtgagagaagaaatggcagatgttgcggtgggggtgaattgggggcagatcacacaggccactggcttgtagtgtgagttgtgagtgagatggtagccattagagaattctaggcagataaataacatggcctgacatattgaaaaggtcattgtggctgctgtgttgagaataagctataacggggcaaaaatggaaggagagaaactggttaggaggctactacaatagtctaaacaagagaagttggtggcttgaacccaaggtgaagcaatggaaaggtgagaagtggttggcttctggatgtatttggaaaggagccaacaggatttgctgatggactggatgtgatatataaaagaaatagcagttgagggtggctacaattttttttttttttcaagacatctcgctctgtcgcccacggtggagtgcagtggcgtgatctcagctcactgcaacctccgcctcctgggttcaagtgattcttctgcctcagcctcctgagtagctgggactacaggtgcatgccagcgcacccggctaatttttgtatttttagtagagatggggtttcaccatatttgccaggctggtctcaaactcctgaactcgtgatctgcctggctcccacatttttggcctaagtaacaaaatggtaaaattcccatctactgaaattggggagcctggaaggagggcaggttgttagaaggaggagataaggaattcactcttgaacatgtcaagttcgaagtgttttttggatatcaaagtcgagatgttgagtaagcagctggatattcaagtcttttggagcctaggaaatgtctactctcaggaaataaaagaacaccatcacctggcaagagacagcggagtatgggaagaacactggtggtcaggtgttaggccctgctctgccaccaggtagctatgtgatcctttgggactcctctggcaacgcaggcctctgtctcttcatctgcaaaatgactgctttattttattttattgtctatttcttttttttttttttttttttttgagacggagtctcgctcgtcacccaggctgaagtgcagtggcgccatctcggctcactgcaagctctgcctcccgggttcacgccattctcctgcctcagcctcctgagtagctgggactacaggtgcccaccaccgcgcccggctaatttttgtatttttagtagagacggggtttcaccgtgttaaccaggatggtctctatctcctgactttgtgatccgcccgccttggcctcccaaagtgctgggattacaggcttgagccactgcatccggccccttatctgtttctttgacaaggtcttgttctgtcacccaggctggagtgcagtggcgcaatcatggaggctcactgcagcagtgacctctccagctcaatcagtcctcccatgtcagcctcctgagtagctgggactacagagatgggcaccaccacgcctagctaatttttgtatttttggtagagagggtttcaccatgctgcccaggctggtcctgaactcctgggctcaagcctccacctgcctcggtctcccaaggtgctgggattacaggcatgagtcaccacacccagccaaaatgaccactttagactaggaatgagttgtgttctcagcccctcctattgtgggagttgatgaattaagtgcttagaataaacatgataatatatgtgtatctgagagcattttggaaactgctgagttctacaccaggtagtggtattggcaataagatttcttccttcattcgctgaagtaatacccagtgagtgcctgccatgtggtgggcactatgtcacatgaggatacgatgatggagaagacgaatctgtgccctcagggagcaccgcagacaaccccctgttgtggcttcactgccaagtgcagacgaaacatggggctggagtgtgacattagccagggaaagcttgttcctgatctgggtctccgtggaaacagtgaacgtgcatgtcaaagatgaggcaagatggtaatcccgatgagggaaaagtcatccacttagctggactagggaagagttgggagtggttgggaagggttggagtggtgggggcttcagttccttccctcctccattctttcgttcaacatttacttccttgccaggagcttctcttagaagctcacagttctgtggtagatgaagagtttcatatctggtctcaggagttcaacttagatattacaataagcagaactgaatcaggattcaaatctgagctaaagagctcagttagctatgtaacctagtagtattaatcatttggtatctgtgggcacattctttgttaggtgctaattaggctgaaaggcatgctctccaggaacttaaattataatcactgtaacagaaagtaagaatgttattttcccctaaaagagtcaggtgttaaggaaaacacactccgtggcagtgtaaccctttaactgcatctggaaactgtccctgtggctgtgtttattcttgtgtcatttagatgtctacgtttatatcgtgaggagagtctctttgaccagataagagtataagatatagctcatcctaattgacaaaattagtcacccacaaaattagtttagaggagacatagtcaacatctaccacgtaatggaatggggaaattttgtcctggagagtgaaaaaagaaaaaacaaacaaacaaaaaaaacgaaacctggccgggcgtagtggctcacacctgtaatccgcactttgggaggctgagatgggcagatcacgaagtcaggaattcaagaccagcctggccaacatggtgaaaccccatctctactaaaaatacaaaaattagctgggcatggtggcgtgcaggagaattgcttgaaccaggacccaggaggcggaggttgcagtgagccaagatcgcaccattgctctccagcctgggctatagaacaagacttcatctcaaaaagagagaaaaaaaaaaaaaaaaccacctgcaatacaaatccaagtgcagctgaagccattgtctttaacagatggccctaacctgttttgagtgctgtttcctaaagctgccaacaaacttcaaatgccttttaccctggcagctatcagtcaagatatagaaatgtgatggtctcacaaatcctatgcaattgtctcttttgctggcaaaagtatgaggccagccgggtgtggtggctcatgtctgtaatcccagcactttgggaggctgaggcgggtggttcacctgaggtcaggagttcgagaccagcttggcaaacatggtaaaaccccatctctactaaaaatacaaaaatttgccaggcatggtggcaggcgcctgtagtcccagccactggggaggctgaggcaggaaaatagcttgaacctgggaggcggaggttgtggtgagctaagatcatgccattgcactccagcctgggcgacagagcgagactctgtctcaaaaaaaaaaaaaaaaaaaaaaatgtatgaggcgtactcaggctcctctcttccagttcagaatcagaaggatttgtgatgttggacaggtcattcggggtctcaggctcattatactgtcattacctggaagccagagtgcctcttttctagtgcctctatttgacattcccttagagctggccctctggtgaatagttcatccctaagaaggccagatacaacttgttaccctggtactatctcacttcatcacttcatttgttgggagttcctgctacttttggatggttgataaagcatgagacccatacagttaagataagaaccaaggaactgggagctctttgaggttgtagaactgacttgaggctttgatgttggggatttggcaggggtgcctaagaccagagttctttctctgagatcatcttctcaacccaggaaatactgtcctgtggccacatggagcaatgaaggggaaaggtagaccctgcttaggccaccacttcgtccagacccacccttgtgaccaggctggggacacacatgttgaagccaccatgtcctcaggtcctgtatagacttgctgttgcctcatgctcagctgatcagctttccatatgatgttatagaatggcctccatgaatcacgaagctcagttttcggatgtgcttttgctgtagatcagtaacatggaatccatcatatcaacactggactctccattcctcatgtatggagaatcatagatattcctgtaaccaacaaagggagtacaaagcatgcatttagactttctatttttaattttttatttatgttgcgtaggtaacacattctcaaggctttttttatttttatttttttattgagaccaagtcttgctctgtcgcccaagctggaatgcagtggtgcaatcttggctcacagcaacctctgcctcctgggttcaagtgattctccagcctcagcctcccaagtagctgggcctacaggcacgtgccaccatgcccagctaatttttgtatttttagtagagatggggtttcactatgttggccaggctggtctcaaactcctgaccttgtgatctgcctgccttggcctcccaaagtactgattataggcatgagccactgcacccagccatttgtttttcgtggagtataaaagatattccctgaaaagtcgcccttccatcgtcatcaccactcagtcatccttccacaggcaaccctggttagtaattttaataatttcttgactatccttccacagattttgtttgtttgtttgagatggagtctcgccctgtcaccaggctggagtgcagtggcgcaatctcggctcactgcagccacctcctggattcaagcgattctcttgcctctgcctcccgagtagctgggactacaggtgtgtgccaccatgcccagctaattttttgtatttttagtagagatggggtttcaccatgttggccaggatggtctagatctcttgacctggtgatccgactgcttcagcctcccaaagtgctgggattacaggtgtgagccaccgcacccagcccacagattttttaatgccaatgacattacataaaaagcactgttgaacccgggaggcagaggttgcagtgagccaagatcacaccactgcactcctgcctaggcgacagagcaagacttcgtctcataaataaataaatggcactgtttttacctagccatttttttcattatgttttggagatcttgccatgtcaatatgtaaggagcttcctcatttatgtctacgtagtatggaagtttgatattgatggacatttatgctgtttctaagtttttgcttttattacatgcagagatgccatagataaccttggacatgtgccattttcacgcatgtccatctacctgtagactagatgtgaaattgctgggtcagataatatgtacatttgtaattttggttgctattgtcaaactctcctccatagagattttgccaatatgttctcccaccaccagcaatgtatgactgtgcctgtttctccacagcctcatggacattgctttgagttaagaatatagcagattctgctgcacagtggctcacgcctgtaatcccaatactttgggaggccaaggcgggcagatcacctgaggtcaggagttagagatcagcctggccagtatggccaaaccccgtctctactaaaaatacaaaaaatttcccgggggtgatggctcgtgtctgtagtctcagctacttgggaggctgaggcaggagaatcacttgaaccctggaggtggaggttgcagtgagctgagattgcaccactgcactccagcctgggcgacagagcgagactccgtctcaaaaaaaaaaaaaaagaaaaaaatatatatatagcagattccctgaagatcaacataggatactgaatcatggggtcccactgtgacactattccacaagacaaacaaaacacggcacatcccagtttgaagaatacagccaggcacagtggctgatgcctataattctagcactttgttgaggctaaggtgggaggatcacttgatcctgggagatcaagaccagcctgggcaacataataagacctcatctctacaaaaatttaaaaatttaaaaaaagaaaaattagctgggcatggtggcacgcacctgtagttccacctactcgggaggctgaggtgggaggatcgtttgagcccaggagatcaaggctgcagtgggctatgatcatgccactgcactccagcctggacagcagagcgagaccctttctcaaagcaacaacaacaacaaaaacagtttgaagactactgcattaaaaatatatccaccaggcaaggtggctcatacttgttaatctcagcactttgggaggctgaggtgagacgatcacttgaggccaggagttcaagaccagcctgggcaacatagcaagaccccatctctacaaaaataagtaaatagagatagatgtaagtaaataaataaattagccaggcttggtagtgcacacctgtagtcccagatatttgagagtctcaggcaagaagattactttagtctaggagttcaaggttgcagtgagctatgatcatgccgttgcacttgtagtgtgggtgacagagcaagaccctgtttctgtgtgtgtgtgtgtgtgtgtatgtatatgcacatatatatatccaagaggtagttggacttctggtagttaaaggaagaaaacttcttaaggcagttctccaccttggtgtttatgccagcatgaattagaaaagaagtagattgatgtttttcattttcttttgagacagggtcttgctttgtcacacaggttgaagtgcagtggcacaatcatggctctccaaagcctcaacttcctgggcttgaatgttcctcccacttcagcccccgagtagctgggaccacagccatgtgccaccatgcctggcaattatttttgtagagacggtgtctgcacctgacctcagcctcacattgatttttttaagacggtgtctcggctgggcatggtggctcatgcctgtaatcccagcactttgggaggctaaggtaggtggatcacttgaggtcaggcgttcgagaccagccaggccaacatggcgaaaccctgtctgtactaaaaatacaaaaacattagccgggcctggtggcgcgcacctgtaatcccagctactctggaggctggggcaggagaatcgcttgaacccaggaagtggaggttgcaatgagctgagctcgcaccactgcactctagcctgggcaacagagtgagactctgtctcagaaaaaaaacaaaaaacaaaaaacaaaaaaaaaacgagtctcactctgttgcccagtgaactctggagtgcagtggtgtgatctcagctcactgccacctccacctcccaggttcaagcgattatcttgcctcagcctcctgagtagctgggattgcaggcgtgcaccaccacacctggctaattttcgtatttttagtagagatggggtttcgccatgttggccagggtgatctcgaactcctgacctctaatgatctgcctgcctcagcctcccagtgtgctggggttataggcgtgagccactgcacctggccagacattgatttttaaagcccaagtcagggccaggcacaatggctcacacctataatcccagtacattgggaggccaacgcaggcagatcatgaggtcaggagttcaagaccagcctgactaacatggtgaaaccccatctctactaaaaatacaaaaatcagatgggcatggtggtgcatgcctgtaatcccagctactcaggaggctgaggcaggagaattgcttgaacccgggagactccatctcacaaaaaaaaaaaaaaaaagaaatgggggtctcactatgttgcccaggctggtctcaaactcctgggctcaagggatcctcccacctcagcctcccaaagtgctgggatttcttttaaatggcgcttcttcttttaaaaagaagaaaaaaaaaattgaagaaaaaaagcaatatgctttatgcaaagatgtgttttagctgtttaaaacttatgttagtgcaagtttgtgttactaatttcctgttttctcttcagtgtttagaaacccacagaaccaggcctgttcactaggtttttctgcgtgtagtgaagtatttttctataataaacattgaatcattttactgcaacttttccaaatctggttctgatttgtttgccactcatcttcatcagccttcatccctcccaaactaatgtgtcttttttctcatgagaagttttctatgtttacaaatgaagaagtttctaagtgaagattaagtcataattatttttgctaatcaaaattgaacattcttttcaggcaaatgtttttgttgttgttttctttttttggcttctaaatacagttgccctctgggctggctgaggcagagtacagaaagccttgttccaactgtccagagttctggttggcagaagacaatagaatagcgaacaggtgcctgtagtcagcacagcccagcttgtgtgtggagcgcagtaggtctcaaccatgataaagtggaaaaacacaaaaaccatggctactctttagtttcctatctttcacatcccttatttttctcctttgaggaggcagtttaagcacatcttgattcatggagagacctaaagatccaaagtatctaaaaagttgggagtagtggcacacacctatagtcccagccactcaggaggctaaggcaagaggatcgcttgagcccaggaggttgagtttacaggagctatgatcactgcatgccaacctgggcaacaaaatgagatcctgtctctaaataaataaaaggtttttctaaatgttctctctcctcaataattacaatttatgttttaacattaagaaacacatcgatatattgcaaaggtgaagggttgttttcctgcatcaggaccagtaatgggttaagtttatttaaaagtgcagcaggccgggtgcagtggctcacgcctgtaatcccagcattttgggaggccaaggtgggcggatcaagaggtcaggagttcgagatcagcctaaccaacatggtgaaaccccgtctctactaaaaatacaaaaaaattagccgggcgtggtggtgcatgcctgtaatcccagctgctcacgaggctgaggcaggagaattacttgaacccaggaggcggaggttgcagtgagccgagattgtgtcattgcactccagcgtgggcgtgagagcaagactccatctcaaaaaaaaaaagaaaaaaaattgcagcaaacagaactggatttgctcctagttctgggagagtcaagagtgctcccttctgtcttcactcttttctcaccttccgctctcccagtctgtctctcccctatacacagctcaggtcattgcagagctagtaaaccttatatcctacaaggagaaaacagagcagccaccctcactgcccctctgccctgtctcggagggctgcaggagtaatgagtctgaaccggcaagtgcaggcagaactcacacatagccatcctgaagcagtaacaagcctttctttggctctgcccatgtcattgttgttagttcagtgccagcatgggaggattcagagtaaaccatcattgaaagaaagtacagggagaaaaatggcaatcagggcactggtagatgcctagcagccacaaagcttcctcctcaccctctgcagtcaggctcttttggaaggcagcttcagagattgggaaaggtcagggaacaacagtagcctcttttaaaggtttgtattacgagacttaggaaggaaacgtgaatgagttgaggttatttagcctgtacgcgagaacatgaaaaggagtggaaatttgttttctttgagtctaagaagggttattttgggaagtgtggctaccagctattccctttttccattgcgggtaggccaagaaggtctgggtttaagttacagtgggtgagatggaagttaacccgtattcaagtgttttgagtgctgacggtgtgccagtcacagtgaattagcagaaggaagaagtgcgccagatattgagaagtatgggctctggggccagccagcctggctttgaattctggcttcaacacatagtagtgttggaaccttggacaaggtactatacctctaagcctcagttgcctcatctgtaaaatgggtataatatacctacttcctcatcagttatttttaagattaagagttaatataggtaaggtgctttaaaaagtggctggtatatattaatcacatttatatgtgataaaaataaatattagcatgagcagtagaaaggatcttagggtaatttgggccagcatttcattttacagataaagaggcagacatagagatagaatcgagattagaagccaattctgtagacttctagtccagggtggttgccactagtcctagctgttttaggacttcgtattgcttcaaaagcatttccctttaggttcctcttccttcccctcctcctgatagctggtatttctagagtacaggcatatgtgccctcatttaatcccttacagcaggctatgaagcaagtgccactattatccccattttctcagaagtgacatctgaggctcagagagcctgcccaaggctacacagaagttcagcctggattaaaacccagacctgacttcagagcctgtgctcttaaccacaccactgattttccttagaaagtcccagtggagtgcagttgtgctcagttaaaccatgtgagtatttgacagaggtgagctgcaggagccacagggcccagggagtctgaggatattttgcaatcccttttcaacctatatctgctttgtttttatttttatttatttatttatgggtttttttttttttttttgagacaagagttttgctgttgttgcccaggctagagtgcagtgatgcaattttggctcactgcaacctccgcctcctgggtccaagcaattctcctgcctcagcctcccaagtagctaggcatgtgctaccacacctggctaatttttgtattttttttttttttttagcagaggcggggtttcaccatgttggtcaggctggtctcgaactcctgatctcaagtgatccgcccacttcggcctcccaaagtgctgggattacaggcatgagccaccgtgcccagcctgctttgtttttagacctggtttctcttatgtgtcttctgacacagtgcagttacactaaagcgggttacccaaagaatctacctgatgaagagagtgaagcttgaaggtcagagcagaccaagagaggccaggagcagagctcttgtgagacagggaccacgtggaggttatcagggctctgggcaaggatgctaatagaccagagatgtcagatgtcagaatccccaccttgaccagtggttattcaccattaatccctatcagaccctgatgacagccttggatttccctctctcctggaaaatgcaaaggctcacacaccaaaaaagtattttggagtagcttcaagtttcataaacccccagcttcacctctgtgcttcgcagcatagtaattaaggtcacactctggattaaatggcctagggtgaaatcctcctttactagttagctgtgtaaccttgagcaagttacttaacttggtcttgggcctccagttccctcacttttaaatgaggataatcatagcatttgattgtaggattgttagaactaaatgagttaatgtatgtgacattcctagcacgtggttaactctatagtagtgttcactatataatagtattgctgcccttgcaccttagcccatttagtaaatgtttatggacagaatgaatgaataattctagttgagatgccatgcctggggtagagcattccaatcagcgtgtcgcagttggtctataggtttttttgggtttttcgtttgtttgtttttgagacggagtctcactctgtcgcccaggctggagtgcagtggtgcagtcttggctcactgcaagctccgcctcccaggtttacgccattcttctgccttagcctcccgagtagctggaactacaggcgccctccacgcccggctaattttttgtatttttagtagagacagggtttcaccctgttagtcaggatggtctggatctcctgaccttgtgatctgcccgcctcaacttctcaaagtgctgggattacaggtgtgagccaccacgcccagccagtttttgttttgtttttttctttttttttgagacggagtttcgctgttgttgcccaggctggagtgcaatgacacgatctcggctcaccgcaacctctgcctcccaggttcaagcaattctcctgcctcagcctcccaagtagctgggattacaggcatgtgccaccatgcccagctaattttgtatttttagtagagacggggcttctccatgttagtcaggctggtctcgaactcctggatggtctataattttgccaagatattgatccgctcgcccctcagggctgtcaaagccccagttggtcgcttctggcttgaagcagtgacatctgcaatgtgaacttctgactttaagcagcagcatctgcaatgcaatgtacaaatatctgtctctctaggtcccctgacatgaaaacagtttgggtagcaccagtcaaagatatcggttggtaagtcgtgagaatccagtaggcagtccagattccaagtccaggagaattttgagaatggatgtcaaagagagtcttcacgactgcactgagtttagaggccgtgggcttcctgcaggcttcacaagtgttggggtccactgctagagcaggctgcacaccacagtgggtacagaagatatcctgccagcaggaagcttcagtgcttcccaccttgcacatgagggacccagggagtcactcacaggatgtgtggagagcccacagtgtgagttgctggagaaaccactgtgacgcagaaaccaggctagagcccaaagccttgtgtaggcaacggacattaaacagatagtgatgagtactgaagtaggttgagcccagaggtgtgagtgctaggaaaaggtggtacctaggctgtgggagtttataacaacccagccttgtatgcaaggtggactctaagagctgtaggaaactatggaagggttttagtcaaggaagtggtatgtttagatttatactctttttttcttataaatctacttttatttatttacttttcattagcttaagtccttgaggggcacagcgtcacacagattctgtgttcaatagctttagcaagattgcttgggaatttagcacaaaccatgccactgtttccatgggcctgagtttacctttccccagattatgctggttttcttcagtttgctgccagcagtcagtgtgttgttctttgctttatacatgtaagtacatctcttgcctaaatagaattcagtttcatttcgagcataaataccttcaatttttttttttttttttttttttttttgggacggagtctcgctctgtcgcccaggctggagtgcagtggcgcgatcttggctcattgcaagctccacctcccaggttcatgccattctcctgcctcagcctcccaagtagctgggactacaggtgcccaccaccacgcccggctaattttttgtatttttagtagagatgggttttcaccatgttagccaggatggtctcaatctcctgacctcgtgatccactgtcctcggcctcccaaagtgctgggattatagtcgtgagccaccgcacttggccaatacctcaattttaataagagctgtgtcctcgctttggttctggaggccccacttacagctagcaaaaaatggccttggactacagccttccaaatgtattgtatttatcttattattatttttgagacagagtctctttatcacccaggctggaattcagtggtatgatcaaagcttactgcagtttcaaattcctggggtcaggcagtgctcccacctcagcctcttgtgtagctaggattgcaggcatgtgccactacacctggctaattttttttttttttgtagagacaatgtcttgctgtgttgcccacattggtcttgaactcctagcctcaaataatcctcctgcctcagcctcccaaagcactgggattacaggcatgagccactacaccctgcccatatttgccttttggaagtcctgttctcagcaggcctctacaggctccaagatagtgggaagagagctttttttttaaattcaccctgacagcataaacatgaatgttagaacatgagttggaagaggctgaggcaggaagatcacttgagcccaggagttcgaggttacagtgaactgtgatggagccactgcactccagctgggcgacagagtgatactttgtctctaaaaaaggaaagaaaagaaaatgaattggaaacagacaaaagtttatctgaggacataagttataaggctccttatagttgtccagaggtgaaaggtgagacatgcctgaaataagtacctggacttttaagggaaaaggaggactcaagcatgatcccccccccccccgccctgaagttctgggtggaaggcgataccacccctgggataggggatactggaagtacaatagttctggaaggttgggacacattgtgagttctgttgaggacttattccacgtgtggtacatgtgggatgttccctgaggatggttaacaagctcagtagataaatgggtccgagcacaggagagatgttggagtaggcagagagaaccatcagcagtggggttaactgcctgccttcagcagggctccttcctaaggggagaaagtttagaaatgggttttgatcagtgatttcttactttatgaccagtttgattggcatgcttctcttctatgcttaacttttagaattcttagataatgtgtattttgagcccttttcataaaaaccaatatagttcactactttgaagaattcatcttttttcttcttggctggctggcctcattaactccttccctgagtgtctttgcgataggagaaagctggttaactcataatgtgatactgtttattttcttagatttgtgacccagaaggaaatctctgacctcagctgtggctcttggtgctggccagaagccaacttcatgtctgagtgcacgagcagcagtttgccatggagagcttggggctgcacacggtgacccttagtgatgggacaacagcctacgtccagcaagctgtcaaaggtaagtatttctggggacctcaggatcctgccctgtccctcagcctctggaaaggagtgtccatttctaagagtcccaccatcaccttgccctcccgcctgcttacccttgcccaccaccacaatttgctctgcattagaatctcctgtggtgcttgatgaaaagggaactctaaaataaaatgctacaagtcagacaatcccagtcataggaaccaatacctctcaaagacagaattcctaatatgtaataagcagttgataaatatttctggaatgaacacagtgttagttatgactccctgcttttcagatatcccctgtcacagttttttagtgctttctagaagcagtttatcatcttaattcaagtatattcaaacattcaaactactaagcatctgccatgtacaagatgctcttttaagccaggcatagtggctcatgtctataatcccagcactcagaaggctgagatggaaagatcacttgaggccgggagttggagaccagcctgggcaacatagcaagactcttgtctctaaaaaaaataataaaaataataatctgggtgcagcagcatgcacctttagtcccagctattcaggaggctgaggcagaaggatcactgaaacccaggagtttgagggttcagtgaactatcactgcaccactgcacaccagcctgggtgacagagcaagatcccatctcttaaaaaaaaaaaaaaaaaaagatactcttcctgattcagagaggaacacccaagcagagatctcatgccctaatccccactaggggatgccagaattgaaaatataggacatgtagttaaatttgaattggacgtaacaatgaatactcttgtaggatacatacatcccaaatgttgtagggacgtatgtatactacatactagggacatacatataccccttataagggatagacatatataaatgtgggattaagctgggcttggtggcatgcacctgtagtctcagctacttgggaggttcagatgggaggatctcttgaggccataagtttgaggtcagcctagacaacagcaagaccccatctaaaaaaaaagtagggggtgttaaatactataaaatactaaaataataataccaagttctaaaaaaaaaaaaaaaagtattgtttatctgaaattcagatttacctgggcatcctgtattttatctggcaattctatccttacactgaaggtacttaaaatcaaggtaggtgtggagtcagaataaagtgtttagggcaaggcctgcaggccagggacacttttcctttcttgccagtgttctcaggcagccagatagcattcgtgtcttccttggacagcaccttgaacaaggcaaatactgccttgttcctactgttcatttggcgttttctggactccatgattgtcactgtcctcatgaagcactgtcattgcaacattgccctcctttatttcaacacactctcagaatatatttctgctcctaagtttacagataagttgtttattgatttcattttaagttgtctgtttcctgatgatgactaaggagtccccttaatctcatcagtaagcactttccatatgacagtgtgtgggggtcccttctggaaaggtttcttgtcaagagctgtctgtgacatgtgggttcttgttgggttcatcttcttgagaacgcaacttctctagaatgcttttgaagcctgaaactctctgtttgcagacttcccactccaggtcttgcccctccagtgcagtctccatgggatggaagaacttagaactctagctagggttgtgtttactccttggacccagttagttcccgtgcctcagtcttccactgagaattaatggtcaaacaaatgaataaaaagcaagtgaccacacctgacctgagagagccactctttccttatatctatccttcttacgtatttctttattctgtcagtcttcctggctgttctttgcccactctgtagtgttgcagtgtgcacttacacacacacatatgcaaacacacactcactcacaacagattttccctctgctcagggtagagctctccttcagagaccagaaccacactttcctgaaaggcttctctgacttctcctctgaagcttttgactgaggcatttttgtctctgtctgctggaagccctaaaattgtaagagacttatctttaattaggatgagtataaaatgtattattcaaacccagcattttaaaagtggaagaatgtgctattaataaatgcactaggactgttccaggcaaactggggcgtatggtcacctctctgtaatgggatatgaggcccttgtcagtcagctgttctccccactgcctctctccattgtagtctctggttgtttgaggaaatagtaggctaagttttttcttcagacaactcttctcaacattttgttttctaccttgaagcagtacccactctgctggccgtagcttgctgatgctttcagaaccccaagtactgatgcccttgccaggacagataaattgttaaaatgagggtagcctactgctctgtgggtgggagggaagaaaatgggttcatcttccccccatctcagctgcctttcctatttcttacctttatctccaccttacctgcctttggttagttgtaggactgttagttactgaccccaagaagactcagtttgggagcaagtttggggattcctctaaaggggagacgtcagcagagacttgggctggaagtaactgtctttcccacctgagcgctcagtttcctaaacctcaatcttctaaggaaaggacaaatcacttgtcattaactttttttttattttttcttcctttttttttttgagacggagtctcaccctgtagcccaggctggagtgcagtggcgtgatctcggctcactgcaaccttcgcctcccgggttcaagcgattctcctgcctcagcctcccgagtagctgggactataggcatgtgccatcacgcctggttaatttttttgtatttttagtagagacacggtttcatgatgttggctagactggtctcgaactcccgacctcaggttatccgcctgcctcagcctcccaaagtgctgggattataagtgtgagccaccacacccagccttacttttttgttttttctttttgagacaggacctcactctgtcacccaggctagagtgcagtggtacaatctcagctcactgcaacctccgcctcccgggttcaagtgattctcctgcctcagccttccgagtagctgggacgacaggtacctgcctccacacccagctaatttttttgtatttttagtagagacagggtttcaccatgttggttaggctggtctcaaactcctgacctcaggtgatctgctcgccttggcctcccaaagtgctgggattacagatgtaagccaccgtgcccagcctttttatttatttattttttatttttttcagacagggtcttactctgtcacccaggctggactgcagtggcataatcacggcttactgcaacttctgcctcctgggctcaagcaatcctcccacctcagcctcccgagtaactgggaccacaggcatgcactactacatccagttaatttttgtgttttttgtagagacagggttttgtcacatagctcaggctggtctcaaactcctgagctcaagcgatccacccgccttggcctcccaaagtgttgggattataggcatgagccaccgaatctgaccatcattaactcttcaatctccctttctttcctttctcatttctcttcttccttccccctctgtcagactcactggacacaaggaagggtcgtctagttctaatttcaagagccttattagaagtgctttccagtaaggtaaaggaagagtaatatcttaggaaatctggaggcttgttaatttttatgctgcttgttgtgttgccttaggtgatctaattttttactagaaaattgaaatgaaaaatgagaggtcaatgaaggaacattactcaacagtggcagtggaataagaccttcatggacacataatagcataatagttgtgctcacatagttctctattgctttactttccatttcttctaaaatgcatattgggcttataataaaagctaggatttattgagggctgaccatatatacctggcactcttcccagttttttatattcgttaactcatttaaccctaacagcaaccctataagagacacagttttcaatccccattttaagaaaaggaaactgaggcacagagaggttagttaaataagctgtccaaggtcacacagctgttaagaggtagagctggaattcaaactctggaggcctggcctggttccagagtctattgtttttaaccattaagctatatatcctgccttcacaggggctcctggtcttagcacactgtcatagtgagggatgaggggatatgttttgattttgttagtttgagctatatctgaattttgacccactggggctcatccaggtttaagggccattagttcaagtctcagcaacttactattaggttggaagtttccacttggctgggcatgggtagaataataagtgaagttattcctcctgttagtaactggaagggaatctgttgggaggtgatgggttccggcaaggcaagtgtcttcacccttagtgtctcaaggcccaggcccagggagacagagcaagggaacaaggaagatgttacccatgcttagacctgcaggctcgtgcctagagactcaaataagcctcagctaaaaacaggcaggcgtttcttagccctcttctggtcctggcccatttctctctatttccactcttaacaggagagaagcttcttgaagggcaggtgatccagctcgaggatgggaccaccgcatacattcaccaggtgacggtacagaaaggtgagggcaccccaacacaccatgccttgtcgagggaagcctgacagcccccaccaagggacccctccatggcactgagctccagggaaaggcaggcattgctctcgttacagaagctctctcctttgaggatggtcagcctgtgcagctggaagatggcagcatggcttacatacaccgcacacccagaggtagggtcaccatcatcacaactcggggaaggatgggaggcaggactggaggatggggtggcaggactggaggatgggatggcacacaactggggtgtagacatgggagctgtcatctccatggtacacacatgctcacctggattagcagccttgcccaccttccctggtgcagaccacaggagcagctatgtctgcaactgggaggtgagccttggagatcagtgacgtggactttgatggtggccttggctccagcacagccacaaagtcttagggctttaaataggacccgaggatatcatccaagaccaggaaaaaaaactaatattttagaatgaagctcctaaggtgctgaagaataacaatttattccttccgcaggtggtttcttgagtgactgttgcatgcctggcgttgtgttaggtgtgcagtatacaagacagaacaaagtcagacacagtccccgctctcctagagtctagagggggaaacagaagtgaaacaagccatcagtgatgaactgatcattacaaacagagatcaggctcagggagggcttctctgaggtagtgatgcttgagctgagaggtaaagaatgaggtagacttagctgggggaagagggatggcagggagggttcagtacttcaggcagaaggaatagcatgtgcaggcctagagctggggggaagaaagaacagcacattccaggaactgctaggagctagagccctgggagtgaaggcagaatgagcaggaggaaactggagagagaaagacagggctggtgcactctgggtttgagtgtcagggtgaggattttggtctttatcctgagaccagtgggaagcatttaaactgttgaggcagttaagtgacatggtcacatttgtgtcccgcaaagatccctctggatgttgtgctgcctggagggaactagagggggtgaggagcgactggtcaggaggctattgtggtcatctaagccaaaatgatgatgggcccctgtcaggtcctcaaggagcttgtgagttcccatttagtgtaccataggagacctcatccttaggtgagacagctgcagaaggagggccagcaagagtgaatcacaaagtgaagggccatgagaaattggatgttgaaaccctccttggtatatgtatctctcattaacttaaagctagggtcccagctgtatctcttccccttgtgtggcatcagggctaaccgcgtgttccctgcagaaggctatgaccccagcaccctggaagccgtccaactggaagatggctccactgcctacattcaccaccctgtggctgtgccatcggagagcaccatcctggccgtacagacagaggtgggcttggaggacctggcagcagaggatgatgagggcttcagtgcagacgcagtggtggccctggagcagtatgccagcaaggtgagcacgcacagcgtgacacggtctgtcactctagacaaccgggcctggcctgcgcactgcctcttggccctgccagaacttcacctctcaagaggacaagggcagccctgtgcttgggcaccatgtgggatattccctttgcccctccaccccagctcccccaactcacctgtcacacatcattgtctagggcatgcaacacagcctggcctggccgctgacagctgtttacgctcacttttgtttacgctgtctttgcagagggaaagctgccataagaaacagtggcatccttatgctgaggagttaggcccagcttcactttggctgctgtagtaatcctctgcactagctgggaaagccctgccagtgacttgtattagctttctagtccactgaggtaattgtatttatttcttctctgtgactcagtcatttggaaaattaacctcagtgggctatgacaagggcatgtgcaacagaacagctgggattcctggattatgaggcccacacagtagctcagctggaaaggaaaagggtcctggctctgcaaataccagtcagtccaagttctttctgccgaaaccatggtcctgcatgtggggaaaagggtacagacatctctgagctttccaaaccagggtgttcccttcctggaatgactacagagcctcaggctggatgtgccagggcttcctgcacgttccttccttccagcagttttacccgaagatgggggaggttttttatttataatgaaaccagtgtgactgaatgatggaggaaaaaaggaagtcctcatgtcttttcaaaatgaagcacaggccgggagcagaggctcacgcctgtaatcccagcactttgggaggctgaggcaggtggatcgcttgagtccaggagtttgagaccagtctgggcaacatggcgaaacctcatctctacacaaaaatacaaaaacaaattagctgggcatggtggtgcgcacctgtggtcccagctactgggaagcggaggtgggaggatcaggaggcggtgactgcaatgagctgagattgtcccactgcactccagcctgggcaacagagggagaccctatctaaaaaaaaaaaaaaaaaaaaagtcacaaaactttacagtaggctacattcactcccacccaggttccctgaggtatatcttagagaccaaatttgagactcgatgttgatgtaaagagaagtgggttttatttaaatcatgagccctgagatctatgcttgctctacctctacctagtccaaacttgggtgagtccctcctctcctcgacctcagcttattcctaatatgatgagatgggaccagatgatctcagaggtcacttccatccctgatgtcccttgattcccgtgattaccccaggagctagtgagacatggaatgaaatccaagtgcctgtgtgggttagcccgccaagcaggtcaggccacctctgaccctaccctctacccagaagctgtttaagtgtccgtgaagctctcagctgcttgagcctctgagctggagcctaactagacagaccttgccatgaatttggcctcacccctctgtcccctgctcactgtaacttgtagagttcagtttcaggagctcctggaaagaccagagtgtgattctgaagcattctagaaagaaagactaagggatagtcccaccaggaccctgcccaggaaagcagaagagcaataagggctccctgcatccagaggctggtgtgagatgggtggctttagcaatatcccagaagaggagacaaaaggggaggacttgtcagctgggtgctgtcattagagctgacatttctggtggaaactgcagcactcccctgggtgcttctggtcgtggccacctcactctgggccccaagtcctatcagatgaacctaggtgagctcatctccacagcaagcccccttgtttatgtacttttaagcactagtttcgtgccaggaggaaggggacccctcccatcagaagatggaggtcttgagagttgcaggctcctaggtgtgtgtgcttagaaggagggtttctggcacttggtccagttcaagcatggccattcagacaacctcccttttcaccttacctagctgtctatgtgatagcctttcttcaatagccgtcacagccactatgacctgtaggtctccctttatcccatcagagatgggtggtgactccccatgcccaccctgtttcttctgtagcatgccccagcatctgttccttgtccgtctagttatgttcttctgccccagaggcccctgacaggtttaaccctgcctgttgggtcttaagctgccagcagggccctgtgtcccaccttcttcactggggagaatacatatagggatctcaagacttttcccccaggttcttcatgacagccagattccccgtaatggaaaagggcagcaagttggagacagagcattccgctgtggctacaagggctgtgggcgtctctacaccaccgctcatcacttaaaggtaaggttgctggcagacagccgtcagctctgcagtcttccctcccaggctgtaattctacctttctgctttgattggaattggtccctgccctcacgttgctggagggaagaaatgagggtacacaggaatgccagcacagagcgcttgacacacatgaatggtacaggagggaagagaatcagggtcctaaagaaaaccaaagagccctggtcatacccttgctcctctgaattatgtgattgcttgtcctcacaggtgcatgaacgagctcatacaggtgaccgtccatacagatgtgacttccccagctgtggaaaggcctttgccacaggtaacctgcctggtgggctgcttccagttgagggtggagggttctagttctgtttgggacctctctgaagggaacccaacaccaggctgctttcctggagaaactaccgtcagagtactctgacttgcagggtgctctctctggaggaaaccttgttacgggagtgcaaggcagcatggttcaggccagcagaaggagcctggagggttggtggagagacccagcctcttgtgtcagctctgatgccaaccagctgtggattattgggtgggccattgcatctctctgggcttattttcccctctgtgaaactagtacctttagccatgagttctctaagtttcttttcatgctcatgttctggtatggctccaactgctcctggagagggaagcagggcagagtgggcttttccagcccctgcccagggcaggggtgggatagaggcagacatgggcttcttgagccaaaggaggtggagagcctgtgcatgaggtggacggtggaggatgagaccccactgggtgctcatctcaccccctgcctgccacatatggacaggctatggactgaagagccacgttcgtacccacactggtgagaaaccatacaagtgcccagaggagctgtgcagcaaggccttcaagacctcaggagacctgcagaagcatgtccgtacccacactggtatgctgggccctgcccactccaaccccattccctgggcaaaaggaattcagcttgcctttcagacttagacctggagcccagtgccatccccagcttgctccagcatggccctctttcccacacccctcctcacatcccaccatttgcataggtgaacgcccgttccagtgcccttttgagggctgtggccgctccttcaccacatctaacatccgcaaggtacatgtgcgcacccacacaggcgagaggccctacacctgcccggagccccactgtggccgcggcttcaccagcgccaccaactataagaatcacgtgcgcatccacacaggtgggctagctggcatgcgaggactaccctcactcaggccccaacccctctactgtaggcttcccatctaagacacattcccaactcccagcccagaacccttctgtgccagccattccaggctggtctggcggtagggtatccccagaacaactctgcttgcagtgagtaattcctcaatttccagttaggtccaatctgaaaggtattgccagtcctctctggggtccctcagctccctaccacccctctacacccaccctgagttctccaactctgactgaactcttgaaaagaggccagggtcaggaatgatggggaagaagcagagtgaactgtcaccttcaactcctcaccttatccgccgtccatgactcctgtgtatcctcaccctccccagtgttatgcccctcatccagctttctgtgttgtgtctcagcatgtgtgtcccctctttcccatcacaactgatacttcagtcatccttgcctcttgcctctgctgttcaccattctcaacctcccaccctcaaccttataagccccagtgccccctaccagccccttcactagccccagccttgccctgtcccccgtttcctttccgccttgtctctggattcagtggttcaacacctgtgtcctctctgtgttccactggccatcttccccaaccctgtccattcagagtctcaggtctcagtccctctccctccctctggctctcccttcaccaaccctgtccctcacccctgtccccttagtttcccccttgccagccccagttcccacccccctcacagcccagtgtccccaggggagaagccatacgtttgcacggtgccaggctgcgggaaacgcttcaccgagtactcgagcttgtataagcaccacgtggtgcacacacactgcaagccctacacctgcagcacctgcggcaagacctaccggcagacctccaccttggccatgcacaagcgcagtgcccatggcgagctggaggccacggaggagagtgagcaggccctctatgagcagcagcaacttgagggtaaggggagtgggcagagggtgagagtggggacaagccaggcctccccatggcatctggtagcagatgtcagccttggctctcctctcccagccgcctctgcagccgaggagagtccgccacccaaacgaccccggatagcttacctttcggaggtgaaggaagagagagatgacatcccagcccaggtggcgatggtgactgaagaagatggggccccccaggtggctctgatcactcaggatggtgcccagcaggtacaggccctggagggcagaggtgccatactagctggcactctccactctctctggggactctgggagccctgaagttctgacagccccactgccacccagcttcttgtttaagttttatagacttcagaggctgaggctgaggagaccacatcttgcagcacagcctctcctcctcctgtgcttccagctcagtctctggggcttctagagcacagttagtagtttctctctttacttggaggctgacaggtcctgttcatctgaacaggatatgggatgtccttctcaagagaggcatgttcatatagcagccagaacatggtatggggtctgaaagcctggggtctggtcctactagtgtactagctagctatataacctgacccttgtccgtacccttgctagaaagtacatctgtgctttctagagttgttaggacacaatcaggtggcgaccctgagctggatacaacagggcccagaggcaaagtggtgataaatagaagtagtcagtggaattcttctagtgtggcctctctttgcaaccttggacccattttgtttgcctgtcacccatcccttccaccactatgacatgaaactaataagctgaccttgtctgggagagcaggtatatcttccttagggactttcagacaaccctccactgacactgccagctcatcttcccctcctgttggcaggtcagcctgtccccggaagacctgcaggccctggggagtgccatcagtatggtcacccagcacggcagcaccaccctcaccatccccagtcctgatgccgacctggccacatctggcacacatacagtcaccatggtcagcgccgatggcacccagacgcagcccgtatgaccaggcggtttgcttggggtttcttattttgtcattcctttccatggggcgggcattaaagtgcagcctaaactagtcaagtcttcttaccaggacaaagattccccacaaaagaaggggtcttccccacagttcctgggccatgagcagctcttacctttaaaagcagttgaatggaggtcaagagacactttctaaatctcaattcaaccctgatttgttgtgcaaccttaggcaaatcacttttccatggacttctgtccattttcaagtgaggggattaaaatatctttggaattttttacagctctgtccttctgtgattcaaaatccctaaattaaattgggctctaagttgggaggaaacccagccttacttagctctgagcctcaggctaattaatctgacccatacggttttatccattctcttctgggttgttcccagcaccttaattggagggatgtttatttggattgtggggagggagagtatactgcaggtggaatggaagacctccttttgtctttcaggtcacaatcattacctctggggctgtggtggctgaggactcaagtgtagcatctcttcgtcatcaacaggtggcactgttggccacagccaacggaacgcacattgcagtgcaggtgagtagagatctgggaggaaaggggatcccacggccagagaagtcaacaaggaataaaggggaattagatgaggatcttgaagagaagggcatctgactcaaaaagagcccatttcagaggacagatccctttcctcctgcatccatgcatctgtctcaggctcgctcttggctgaggcagaatgttgaagcctcttctggccttcaggataactccgatggcagtccacctgtggtccaagcccttcatcattttgtgtctctgtttcttcatctggaaatgaaggaggctgacgtagatgatcaccacggttctcttcagccagtccttcctccgtgagcaagtgggtctctctgaccctggctattccagggccccctggccatgcctagcctaataggactcttcatccgtgaacttcatgtttattggagccctactaagtgctcagcgtgtggcactgggtagatgggggagagtcaaaaaaaaaagtaggccacatattactaacactggaatctagcagggagggtctcactgtctccttccttctgcacccccttccccacagctggaggaacagcagaccttagaggaggccatcaatgtggccactgcggccatgcagcaaggggctgtgaccctggagacaacagtgtcggagagtggctgctgagtccaagagggctgggtcccacaccatgctggaggaagtgccatctgcatggccactcttgcccccaagggcccaggctgtggctgacacatagaaggtggccacataggtctctggggtgagaagacagcaagaaaactgcctaactgaagggaatgggggccctgctcaagaagggggccaggcagctggaatcaggggagtgcatcatcctcgggagctgacaacagccaggctacaccagggcacccgcctctcaaaatcagctgggcgcccactctcctcctaaagaacacccttctggccctcagtctgttccccttctcaggtagagattggggctgctatggggactggccctgtagggttgagccacagacagctcttcagcccagtagcagtggagcaggccctgtcctgccctcccagcaataaccacctccctggaggccagctgagatgcctggctacttggcaccagggacttcctgacaccacagtcaattaattcctcaggggcctgtggctggagaaaaggtgcccagcccccaccactcctcagctgccccccaacctctctatggcagagaggcagggagtggccctgtacatagactgctggggattgggtttgatttgttttgtttttttaaattccattttgataatttttttcctgctctgggtggtggtggcacatggatgaatgagtatttaataaaagttccaaatttccacctgggtccctccatcctttcagctctaggcccgggtggcagggttggtcaaatcaggctatcagccctgtctccctggcacaaaccccactcagccttggtgccagagtggtggggctggcctgccagggacacaggtgggaaggaagcccagtataagataaagccctgaggagctgctggtggcttcttgcccacagctgagcaggtgggctccagggtagccaaacaggaccagggtgaccgctgcttccaggctctggctgagtctcaggcctcatgtgattgagctgggggaactcttttcctgccttttcttgtgaaatgtagtcagagcccctccaacccagccacccccaaatcacacagtcagcttctccaagagggcaaagccccaggttagagtgaggctgggggacacctttgccaaggttactgagattcaaggagcagagtctgatgcctctggagctgaagtcttggctctattacccagctctgggggtgcccacctaggtgcctaggactgtgctgtgggatttcaaagccacaatcagaccccactgaaaagtgagttggtgagaccagatcagctccagggggaagaagggatacaggggaaggcacttgatgggaagaagctctgggtttgactctgcctacacaggaacattgcagggattggtggtgcctcttttcctctctctgctgtgatggatatgccccaaccccttcctgcctcctaggattggaaccccctcctctgatccaggcatcctctcccaggatgcctagaaagctcccatttactcttgccaccagctccttgggaagagaggggcgggggcgtgcttccaggcaggaggtattcccagcaccttacttggagggatttttatttggcttagggggtagggggaggtgtcttagaattggcctgagcagatgtcttcaacatctgtgaccaccattcctggtgtgggcgtgtcccagtccttttggacactggatctgaagaaaggaagcactgacatggagggccctgaatcccaagcctgctgctgctgggacccttaaagttgaggtgcaccacaaggctcacccccatgtgtttcaggaagtttccagtgtcttcagggctactggggctagagtgggcagtgctctgagtaccgtttagagccagtgctgaggggatagggagccagcaagtcaagtgccacatcctgacctggagaggtgccctggcccatttccttctccagctttgtgatgttgcctttgtttccttccacttggatggagtcccaccaccatggtaatgttaagtagcaccaaaagctctacccagagcctactatgtgctttacgtccattctcagacattcttacaacacggaggcatttttcctgctttacaaatgaggaaactgctcaaggaggttaagtaacttacccaaggcctcctatgttgaactaggactggacctttactctgtctgaccccaatatcaggatgagcttgctttttccctcagcaagctgcgtctgggagccctggaaggctccagaagcctccgggtctgaggaggcttctaaaagggcctcacatgccccgggagccacgtggatacagaacgagggttcccgctctcagagagttggtccccagttcccatgcagggagtggagcctctgagcactgccagaacaacaggcagggttctcgacagcacagagcctcacgcaatgtgcaggcaggtggtgctctcgctccaccacggcacctctgcggtctctgcagccgtttgcatttcctgaaaccggatcttagtgtcagagccgcccccagccgggcgggcgcctcagccatggccctgcgcaaggaactgctcaagtccatctggtacgcctttaccgcgctggacgtggagaagagtggcaaagtctccaagtcccagctcaaggtgaggggcacccgggacccgggggaggacggcagatgcaccacaccagcccctgccgcctgggagccaggtgtggacactgtgccactccaggggcacccagccatccagcgtcccgggcctggggtcggggggctggtcctgggtaactgggccaacgtagcctggtagatgccgctgcccaccctccagagacctagtgaagtgtgtgcagaaaccttgcgcagaactgggccccacaactggaggccaggaggttctgagggccattatggggttctgagggccaggagccaggccacatcccagactctgtgtgatgagcacacacacctccacagagtcatgcttgggcacgcagtgtgctctttcttgctgcttcctcctgactttcaagagaaacagttagccagtgcttggcagtcatttcctctggagctgagagaggcataaaggggccgcccccagtcccaaacctgtctggcctgtctaaccctgccccccaggtgggacagagctgcggagtgggtgaggactgaggaccctattatactgctacgcagctcacccccctatccaccacacatatcaggttgggaaacttaccttaggccttgagacctcaggtagggaagggggagaatctaagcccaggaaaatcccaatcaatgattgtcctgaagtcaatcatctggcctagacaatttctgggaggccaaggagtttttctctctcttcctctagtcctccagtagtgctgccttccctaccctagttagtggggaggaagcaaggccctcagccactagaatcagcgaacactgggggaaaggagcaaggtaggcctcagctctctaggacctgccataggggtgccttcgttcactctgcaagtacttgagtgcccctcgtgaggctctgtgcctggcatgtggctaggcactaaactggtgtctccctgccccatcctccaaaggagacgtgtggtctcaaggaaacctccattcttaatgaccgaggtagagggtgctggatacctgagagatgaatgggacagaacagttattgtgccccaccaccgttccaaccccctactttactgaacttggatgtgaggaacttgaatatcccaaactggtcctatgttaaattccttacctggatttgtgagcatctaatagatgatttcactcccccaggaaggagagcccactactatcttttgtcacctagggagaacctcctaacaggcagattcttccttacatcctatttaaatctcttgtattgcagatcatgtcatttggttgggtcctcagtataaatggaaaaaagtcgatcatccaaaatccatttctgcaaactctgtgtcccacccctacctcccaccctgtccctttaatatcttgccagacaataccagcccccgtggctttttgcttccagggtaacattttccacttctgtattacctgtggccactgagacctctccaggctctctctgcccttcacatggaaagtacagcctttaagtggctccccttttcctggtgccatcagccagtaaagcctcctagcttgagcctctgtcttgccctctaaaagggccactacccactccctcatccccacaggttgcgtatttctagggaaatactccatggagagcttgcatgcttgaactgtccactgtctgtacctcatcacagctcatattgaacctactgccagcaacatctctggtcacacaggatcaattatagagttccctcctacttgacagaaaacttgtcaactctggaaacctgggctaacaatgggagtctcaggggccaagtgggggtggggcggaaatggcggggctcctttcaagcccataatagtgaatattggaagaggaggaagtagtgatagtgttggggggcggggattccagcaaagcaaaggagtaatagagaagtggtcaaaaggcaaaggaggaagtagacgagagagttatacaagcagggcccacctctccccagaaaagacttggggatgagggaaaagaccttggagtcaatctggttttttgttgttgttttagagatgagatcttgttctatcactcatgctggagtgcagtggtgcagtcatagctcacgacagcctcaaactcctgggttcaagcgatcttcctacttcagcctcctgagtagctgggactacaggcacatgccaccacgcctggctaatttttttattttttattttttagagcctgagtctcattatgttgccccggctggtttcagacttctggcctcaagtgatcctctggcttctgcctcctgagtagctggaattatagtcttgagccacctcactgggctggttactaaaaccatccctagcgttagggtcctgggttggaacctggcaagagacctgcactagcccagggcaagatgtgtcggtgcgtgacatttgccacttctcccctaatgtgttggtagacgggctcccagtggctgtcctgggcaaacccacgatgaggccagagggtaggaggaagaacagcacgtcctctgagaaaagcccaaggagtagggttgtttctcctggaaaagagaaggcttgagggaaaaaccagatacttctttctctctttgaattcttgtagaaagtacaatggcttcatccagttgggttgagaacagagaaagtaaaccaataggaatggcactcctgcccaggatggatttaggttgaacacaaaacttcccaggagttgagggctgtgagttcttgcaaggttcccaaaaccgcctctaaaaacctttggaaggtagccatcctgacagagggctatagagaggggagcccttgggaatgatgtgtgtcctactgaacacaccctcttacccaggggagcagttttgattttagaactagtggaggatcagctgataatttggcctccttccccactgactatcaggcagtggggtgaaggggtatgtagatggagcagtgtgtctctggtttgatgaggatctttgggtggcaccaggcctaccacttcctccttgactggcaggagctgggggaagggagggagggtagacaggggccttccagtctcctgcacctccagctgatattcagggcagtcctggagcccagagtgagactcttgcccactgagaatcaatgagcttcaggttttgcctcctctggagagggacaaccaccttctccttagtggaggaaaagttaagaacagctccagtccaaaaacctgctggctggctaggatcattagctttgtcctgacccctgtgtgctactggtctccccaggctaggatttgtgggtagggaggggaggatgatttaatgatgtgcagagcacttgactcagaaccacgcaggcttggatccgtactgctccccatctgggtgactttaagcaagtcactgtccatcttcagtttctcatctataaaccagggggttgatcaccaagctgtcctacaaaactaaagaataaattctgtacctcaagtaggtaaaattggtctatgatgcagcctctcctttcccttaactgggcctctgtctcctttgatgcccacacccaacccctacagccccttcttgctctcagcaggtgacacagctaatccaaagattcccaccttttaaaatttccagtgttcctccatgatagtagttatgcttttctagtaacccactagaatacatttggtaactcttaaaaggagctgtgtctttttttttttttttttttttaagacagagtcttgctctgtcacccaggttggagtatagtggtgcaatctcagctcactgcaacctccacctcccaggttcaagtgattctcctgcctcagcctcccaagtagctggaatcacaggtgcccaccaccacgcccagctaatttttgtatttttagtagagccggggttttgccatgttggccaggctggtcttgaactcctgacctcaggtgatccacctgccttggcctcccaaagtgctgggattacaggcgtgagctactgcacctggctggatctgtgtcttttaaaaggatcacttggaacctagattcatttaaagaccttgctgggcaaggtggctcacatctgtaatcccagcactttgggaggccatggcaagagaatcacttgagtccaggagtttgagaccagccctggcagcatagcaagaccccaactctacaaaaaatgaaaaaaattaggcatgatggctcctgcctatagttcctgctactctggaggctgaggtggaaggatcgcttgagcccgagaggtcaaggcttcagtgagccatggttataccactgcattccagcctgggcaatagagtgagattctttcttaaaaaaaaaaagtcaatttaggagagaattctttctgaaatcattgctgggtgcttttatggattcccaaaccctggggatcctgaaggctggaaactacagaatcagttcttgctgactgttgccaacatggacctgacacccacacttgagtttttaggatccccaatccccacacttgagttttagaggatcccccaagtcctgagaggagaactactcccctacatgcctccagaggaaagagtgaatagatgaagcatctcaaaggtcagtgactgccaactcagaggccagaggctccctgggtttgtggagactgtgggagtcctctctgaggaaacccaaatggcaacttgtgaaaaatacacctggaccccacccctggaaactctgagtcagtaggtctgggctgggcgggcatgtttcagtttcaccagttccctgggtgattgtggtgctcagccagggccagtgcactgtagagatcaagagcagggctttggagtcagaccttgggcaagacgcttcctctctctgagccttgatttcctcatctctaaaatgaggataatgagagtcccctgatccagggctgaggactgatggagatctgcaagtgagctcctgctcacaactcctctgtcactgccatttcctttgcagcatgacccctcccctagtcacaccctctctccacccccaacccctaccgcacccaggcacaggaagctgacagtctgaggtcggcccagctctctggagagaggccctgagtgtctgggcatttaattcttccttgtcctactatctgacagcacgcgggggtcagagtctctgccctgggttcttcaggatccaatggcaaaagtgcaggtgaggtgcaggtcttagggacagtacagggcgacagaactaagctcaaataactgtgctgttatgtggcaggttctgtcctgggtcggggagggcattcataggtcctctcctaagactccctttttagagagatgaaaactgaagcccagtaaggttaatatgctcactgggatttagtcaatctctgtctggcttttgtattttgtctgcttcttcccatgaagtgtttaagttcattcaagagatacttaatgagcatccattaggtgccaggccccgtgataccacagtgaaaaaaacgcaaatgtttctacccttgtggtgctgacattctagtcagaggaggcagataataaactaaatgaaatgtacaatatgatgaaagatgatacatgacatggaagaaaataaagcagaaatgggtagggatcatggaggtcaggcaggattgggttacaggtttaaataaggtgatcaggccgggcagggtagctcacacctgtaatctcagcactttgggaggctgaggcgggtggatcgcttcagcccaggaattcaagaccaacctgggcaacatagtgaaagcccgtccctacaaaagatagaaaaattaggcccagcacggtggctcttgcctgtaatcccagcactttgggaggccgaggcgggtggatcacctaagtcaggggttcgagaccagcctggccaacatgttgaaaccccatctctactaaaaatacaaaaattagctggatgttggtggcaggcacctgtaatcccagctactcaggaggctgaggcaggagaattgcttgaacccgggaggcagaggttacagggaactgagatcacaccattgcactccagcctgggcacaagagcaaaactacattgcaaaaaaaagaaaacacacacacacatatacacacaaaaattagccgggtgtgatggcgcacgcctacagttccagctactcaggaggctgatatgggaagatcacctgagccagggcggtcgaggctgcagtgagctgtgattgtgccactacacttcagcctgggcaacagagtgagacccagtctcaaaagataaggtgatcagaggatattccacctggtcagggaatatatattccctgagaaggtgtcatctaagtaaaaacagggaggaggaaagggtttgagccatgcagtgacctggagagaaatattccaggctgcaggaacagtaagtgcaaaggcccttgggcaagaatatgcttgacctgctggaggaacattaagaaggcagaatggctggaggcaagtaaacaagagggatgaggtcagagaaggtgcagcaggccaggtcacatggggcctggaggcctgtggaaggactcgaacttttactctgaaaattatgggaaaccattggagcatttgagttagactttaggagtcagtcagaaacattcagtgaatgggggacattatactatctttggagtcaaggttgagattagagtcattgctgccctcaaggaatgtagaacacccagaaatgctcacacaaacagtgaacagcaaaagaatattattatagagcaacttaatagggcaaattaataactgggttaatggcaccctttttcatccctattgttttaaattttatcctaaagacaatatattctcctggtttaaaaaaagaaaacacacagaagaatataatgttaatgaagaaattcggggctgcgctgtggtagctcatacttgtaatcccaacactttaggaggccgaggcaggaggatctcttgagcccaggagggctcttcctgcctcggcctcctaaagcattgggattacaggtatgagccaccatggcctgggcaatataatgggaactcatctctatgaaaaaaaagaattttttttttttttttccagacagggtctggatctgtcactcaggctggagttcagtggcacgatctcagctcactgcagccttgacttcctgggctcaagcaattctcccacctcagcctcctgagtagctgggactacaggagtgtgccgccacacccggctaattttggtattacaaaaaaattttttaacttagctgagcatggtgacacatgcctgtagtcccaattactcgggaggttgaagtgggaggatcgcttgagcctgggaggcggaagctgcagtgagcagaaatcgtgacactgcaccccagcttaggcaacagagtgagaccccgtctctaaataaataaacaaaaataaaaatgaatttattataaaattaaaacatgttagtggtaattttttttttgtgggggtgtgtgtgtgtatgtgtgtgtgtgacagagtctcactctgccacccaggctggagtgcagtggcactatccttcctggctcacctcaaccgccacctcccaggttcaagcaattctcctgcctcagcctccctgtaactgggattacagccgcctgccatcacacccagctaatttttgtatttttagtagagatgaggtttcgccatgctggccaggctggtgttgaactcctgacctcaagtgatccgcccacctgggcctcccaaagtgctgggattacaggtgtgaaccactgcgcctggccaaatttgtttttttgtttttgtttttgttttaatttttagatggagtttcactcttgttgcccaggctggggtgcaatggcacaatctcggctcactgcaacctctg

SEQ ID NO: 184 - DNA, 2663 bp, Homo sapiens
ggccggcgctggtggcggggcccggtgcatggcggtctgtcggcggagtcgccctcgggggctgtcagatttgtgacccagaaggaaatctctgacctcagctgtggctcttggtgctggccagaagccaacttcatgtctgagtgcacgagcagcagtttgccatggagagcttggggctgcacacggtgacccttagtgatgggacaacagcctacgtccagcaagctgtcaaaggagagaagcttcttgaagggcaggtgatccagctcgaggatgggaccaccgcatacattcaccaggtgacggtacagaaagaaggctatgaccccagcaccctggaagccgtccaactggaagatggctccactgcctacattcaccaccctgtggctgtgccatcggagagcaccatcctggccgtacagacagaggtgggcttggaggacctggcagcagaggatgatgagggcttcagtgcagacgcagtggtggccctggagcagtatgccagcaaggttcttcatgacagccagattccccgtaatggaaaagggcagcaagttggagacagagcattccgctgtggctacaagggctgtgggcgtctctacaccaccgctcatcacttaaaggtgcatgaacgagctcatacaggtgaccgtccatacagatgtgacttccccagctgtggaaaggcctttgccacaggctatggactgaagagccacgttcgtacccacactggtgagaaaccatacaagtgcccagaggagctgtgcagcaaggccttcaagacctcaggagacctgcagaagcatgtccgtacccacactggtgaacgcccgttccagtgcccttttgagggctgtggccgctccttcaccacatctaacatccgcaaggtacatgtgcgcacccacacaggcgagaggccctacacctgcccggagccccactgtggccgcggcttcaccagcgccaccaactataagaatcacgtgcgcatccacacagagtctcaggtctcagtccctctccctccctctggctctcccttcaccaaccctgtccctcacccctgtccccttagtttcccccttgccagccccagttcccacccccctcacagcccagtgtccccaggggagaagccatacgtttgcacggtgccaggctgcgggaaacgcttcaccgagtactcgagcttgtataagcaccacgtggtgcacacacactgcaagccctacacctgcagcacctgcggcaagacctaccggcagacctccaccttggccatgcacaagcgcagtgcccatggcgagctggaggccacggaggagagtgagcaggccctctatgagcagcagcaacttgaggccgcctctgcagccgaggagagtccgccacccaaacgaccccggatagcttacctttcggaggtgaaggaagagagagatgacatcccagcccaggtggcgatggtgactgaagaagatggggccccccaggtggctctgatcactcaggatggtgcccagcaggtcagcctgtccccggaagacctgcaggccctggggagtgccatcagtatggtcacccagcacggcagcaccaccctcaccatccccagtcctgatgccgacctggccacatctggcacacatacagtcaccatggtcagcgccgatggcacccagacgcagcccgtcacaatcattacctctggggctgtggtggctgaggactcaagtgtagcatctcttcgtcatcaacaggtggcactgttggccacagccaacggaacgcacattgcagtgcagctggaggaacagcagaccttagaggaggccatcaatgtggccactgcggccatgcagcaaggggctgtgaccctggagacaacagtgtcggagagtggctgctgagtccaagagggctgggtcccacaccatgctggaggaagtgccatctgcatggccactcttgcccccaagggcccaggctgtggctgacacatagaaggtggccacataggtctctggggtgagaagacagcaagaaaactgcctaactgaagggaatgggggccctgctcaagaagggggccaggcagctggaatcaggggagtgcatcatcctcgggagctgacaacagccaggctacaccagggcacccgcctctcaaaatcagctgggcgcccactctcctcctaaagaacacccttctggccctcagtctgttccccttctcaggtagagattggggctgctatggggactggccctgtagggttgagccacagacagctcttcagcccagtagcagtggagcaggccctgtcctgccctcccagcaataaccacctccctggaggccagctgagatgcctggctacttggcaccagggacttcctgacaccacagtcaattaattcctcaggggcctgtggctggagaaaaggtgcccagcccccaccactcctcagctgccccccaacctctctatggcagagaggcagggagtggccctgtacatagactgctggggattgggtttgatttgttttgtttttttaaattccattttgataatttttttcctgctctgggtggtggtggcacatggatgaatgagtatttaataaaagttccaaatttc

SEQ ID NO: 185 - protein, 577 aa, Homo sapiens
MESLGLHTVTLSDGTTAYVQQAVKGEKLLEGQVIQLEDGTTAYIHQVTVQKEGYDPSTLEAVQLEDGSTAYIHHPVAVPSESTILAVQTEVGLEDLAAEDDEGFSADAVVEQYASKVLHDSQIPRNGKGQQVGDRAFRCGYKGCGRLYTTAHHLKVHERAHTGDRPYRCDFPSCGKAFATGYGLKSHVRTHTGEKPYKCPEELCSKAFKTSGDLQKHVRTHTGERPFQCPFEGCGRSFTTSNIRKVHVRTHTGERPYTCPEPHCGRGFTSATNYKNHVRIHTESQVSVPLPPSGSPFTNPVPHPCPLSFPLDSSHPPHSPVSPGEKPYVCTVPGCGKRFTEYSSLYKHHVVHTHCKPYTCSTCGKYQTSTLAMHKRSAHGELEATEESEQALYEQQQLEAASAAEESPPPKRPRIAYLSEVKEERDDIPAQVAMVTEEDGAPQVITQDGAQQVSLSPEDLQALGSAISMVTQHGSTTLTIPSPDADLATSGTHTVTMVSADGTQTQPVTIITSGAVVAEDSSVASLRHQQVLATANGTHIAVQLEEQQTLEEAINVATAAMQQGAVTLETTVSESGC

SEQ ID NO: 186 - DNA, 2447 bp, Homo sapiens
ggccggcgctggtggcggggcccggtgcatggcggtctgtcggcggagtcgccctcgggggctgtcagatttgtgacccagaaggaaatctctgacctcagctgtggctcttggtgctggccagaagccaacttcatgtctgagtgcacgagcagcagtttgccatggagagcttggggctgcacacggtgacccttagtgatgggacaacagcctacgtccagcaagctgtcaaaggagagaagcttcttgaagggcaggtgatccagctcgaggatgggaccaccgcatacattcaccaggtgacggtacagaaagaagctctctcctttgaggatggtcagcctgtgcagctggaagatggcagcatggcttacatacaccgcacacccagagaaggctatgaccccagcaccctggaagccgtccaactggaagatggctccactgcctacattcaccaccctgtggctgtgccatcggagagcaccatcctggccgtacagacagaggtgggcttggaggacctggcagcagaggatgatgagggcttcagtgcagacgcagtggtggccctggagcagtatgccagcaaggttcttcatgacagccagattccccgtaatggaaaagggcagcaagttggagacagagcattccgctgtggctacaagggctgtgggcgtctctacaccaccgctcatcacttaaaggtgcatgaacgagctcatacaggtgaccgtccatacagatgtgacttccccagctgtggaaaggcctttgccacaggctatggactgaagagccacgttcgtacccacactggtgagaaaccatacaagtgcccagaggagctgtgcagcaaggccttcaagacctcaggagacctgcagaagcatgtccgtacccacactggtgaacgcccgttccagtgcccttttgagggctgtggccgctccttcaccacatctaacatccgcaaggtacatgtgcgcacccacacaggcgagaggccctacacctgcccggagccccactgtggccgcggcttcaccagcgccaccaactataagaatcacgtgcgcatccacacaggggagaagccatacgtttgcacggtgccaggctgcgggaaacgcttcaccgagtactcgagcttgtataagcaccacgtggtgcacacacactgcaagccctacacctgcagcacctgcggcaagacctaccggcagacctccaccttggccatgcacaagcgcagtgcccatggcgagctggaggccacggaggagagtgagcaggccctctatgagcagcagcaacttgaggccgcctctgcagccgaggagagtccgccacccaaacgaccccggatagcttacctttcggaggtgaaggaagagagagatgacatcccagcccaggtggcgatggtgactgaagaagatggggccccccaggtggctctgatcactcaggatggtgcccagcaggtcacaatcattacctctggggctgtggtggctgaggactcaagtgtagcatctcttcgtcatcaacaggtggcactgttggccacagccaacggaacgcacattgcagtgcagctggaggaacagcagaccttagaggaggccatcaatgtggccactgcggccatgcagcaaggggctgtgaccctggagacaacagtgtcggagagtggctgctgagtccaagagggctgggtcccacaccatgctggaggaagtgccatctgcatggccactcttgcccccaagggcccaggctgtggctgacacatagaaggtggccacataggtctctggggtgagaagacagcaagaaaactgcctaactgaagggaatgggggccctgctcaagaagggggccaggcagctggaatcaggggagtgcatcatcctcgggagctgacaacagccaggctacaccagggcacccgcctctcaaaatcagctgggcgcccactctcctcctaaagaacacccttctggccctcagtctgttccccttctcaggtagagattggggctgctatggggactggccctgtagggttgagccacagacagctcttcagcccagtagcagtggagcaggccctgtcctgccctcccagcaataaccacctccctggaggccagctgagatgcctggctacttggcaccagggacttcctgacaccacagtcaattaattcctcaggggcctgtggctggagaaaaggtgcccagcccccaccactcctcagctgccccccaacctctctatggcagagaggcagggagtggccctgtacatagactgctggggattgggtttgatttgttttgtttttttaaattccattttgataatttttttcctgctctgggtggtggtggcacatggatgaatgagtatttaataaaagttccaaatttc

SEQ ID NO: 187 - protein, 507 aa, Homo sapiens
MESLGLHTVTLSDGTTAYVQQAVKGEKLLEGQVIQLEDGTTAYIHQVTVQKEALSFEDGQPVQLEDGSMAYIHRTPREGYDPSTLEAVQLEDGSTAYIHHPVAVPSESTILAVQTEVGLEDLAAEDDEGFSADAVVEQYASKVLHDSQIPRNGKGQQVGDRAFRCGYKGCGRLYTTAHHLKVHERAHTGDRPYRCDFPSCGKAFATGYGLKSHVRTHTGEKPYKCPEELCSKAFKTSGDLQKHVRTHTGERPFQCPFEGCGRSFTTSNIRKVHVRTHTGERPYTCPEPHCGRGFTSATNYKNHVRIHTGEKPYVCTVPGCGKRFTEYSSLYKHHVVHTHCKPYTCSTCGKYQTSTLAMHKRSAHGELEATEESEQALYEQQQLEAASAAEESPPPKRPRIAYLSEVKEERDDIPAQVAMVTEEDGAPQVITQDGAQQVTIITSGAVVAEDSSVASLRHQQVLATANGTHIAVQLEEQQTLEEAINVATAAMQQGAVTLETTVSESGC

SEQ ID NO: 188 - DNA, 50833 bp, Mus musculus
  misc_feature (1)...(50833): n = A,T,C or G
aaatgcacaaaccttgtatatttattaaaaagcttcttgcactatgagagggggttggtctggtgctgcttgtatttacgtgctaagtcctagctcccaaggttgcccctgactgcccatgagcagatcctcatgtacaccaagtgatgctatgtaaaccttgccccccaatttaactggtcaatattaaaggctagagcctgtgattggacagtggagagagaaaggtgggacttgggaactgagtgaggggttcaggaggacaggaaggtgggggaggccaccatgagaggagatggatcatgagtacatgtccaggagaaagagcaagtgacaagggacatgtggctcggatatgagttagaatagctctaaacctgtcccatctcgggttacagcttatatataaaacacctgggttgtatgccttttatacaggctagctagaactatagctgggcagagttctcatctattctaactcgaacatattggtctaatgttcttcccagcaacttcccagctgtgtggcatctcctgctgccttagttagggttttactgctgtgcacaggcaccatgaccaaggcaactctaataaggacaacatttaattggggatggcttgcaggttgagaggttcagttcattatcatcaaggtgggagcatggcagcatccaggcaggcatggtgcaggcagagctgaaagttctacatcttcatctgaaggctgctaggagaagactggctttcaggcagctagaatgagggtcttaaagcccacacccacacagacacacttcttccaccaaggccacaaccactccaccaaggccccaccttcaaatagtgccattccctgggccaagcatattcaaaccaccacacctgccatcctgtctcactctggctgctcctctcatagcaactctcccatggtgacttctcttggccactcaccctctcttcacagggatcagacgtctaccttaactctctgcccagctataggctaaccaactctttactaaccaaacagaggtgatggagaacaatttttacccatctttgagacagtaggtgctggacaatgctcaagttctgaatgcaaccagatctgtgggcacagtaaccagcatttgaatacacagctcttgaaaccatcccccagtagatctcagggagtttgtaactgcacactatacaagataacagcaacaaccaggaacaagcacacaaaccaaacccaaagcaaaaactagttcaagttgttttaagaagaacaaagatctttgcattcctacagtgggaaagaaattttcttttctctagttccttaacacccacgccacacaaccgtcctttaacatctgcccacacagacagactagctaggacaatttcctagaaatgctatttctctgacagggttgctgtcacctacctctcatcccacattggtccataccgaatcagtttatgttcatacagttttctagatcttaattttcttcataggtgtgcgtagctgtgaatgcacaggtgcaggtgcctgcggaggccaggagagagcgtgggatcccggggaggggagctgggggtaccagtgatgagctgcagggcaggagagcagggagcagctctgccagctgagccatctccccaacaaacccatctcagatcattttccttgcaacctgagtgtgattttcacctcggacacccttcctgcgttgccagaattctttcagccaagtccttaaggaagggatatttattagaaaccatctaacaatgagtgagggtccatttttctgatcaagagctctttattaatccaggggtgcagcactgaaccatacttacctcctgcccgaggcctcctgccatggtgagctggtgaccatgaagcagtaacagggattgtgagctgcttcggcgtgcagggtaggaccgagtgtgggggtgcagggggctttttttctcatgtctcttttagttgttgtcgttgttgtttttttaaatatatttatttgtttaagtgcactgattggtgttttgtcttcatctgtgtctgtgagggccagatcccctgaacctggagctacagacaattaattgtaagtgggtgccctgaaccactgagccatttctgcagccacctctcttttaaatagtaaaacactctcctttataaataaattaagtttttcctgagtcttaaaacaagccttggtggggatggtgagatggctcagtgggtaaaggtacgtgataccaaggcttgagacctgaattaaagccttcacactcacaaggtaggcaactgaggcctggaagttgccctttgacctatacccatgggcactgttgagtacaataaataaataaataaataaataaataaataaataaataaattcatgaataaattcaaaacatgaagtaaaaattgtagattggaaagacttagaatgtgcattaagggagcttagggtctcagagaaaaaagtatgtgtttttcttgttgtgtctactctgatctcagccctagtgtgtatgttcctaagtgaacacgtgttcccatggtcaaggttaaggagcagaaaggggatcagggaaggctaaaggttcagtgttaaggaaggacaaatacagatgaaggagagaagtcagaaagactatacaccgctaactgcttttcataaaagagtttcagctcgtttatggatttttccctttttcttgtagtggaaaatatatttgacactgattgtgtaaaatccactgtgaagccccacagctctggggtagctattctagctttaagagtccaccatctcagtgaactttgggtctggttaatttggtgtgtgtgtgtgttcactatgaagttttgttttgttttattgggacagcctctctccgtgtggtgctggctggcctggaacttgctatgtacactaagatggtctggaacttacagagatctgcctcctgtgtgctaggattaaacgcatgggtagagctcgtgatagttttaatgaaaaagaagaaaaataatcaaacaaatatttagagtcaaaggcagagtccttgttttgttgtacttaatttcgcactgcttaatggacaggccagggactgatgacttcaaactctttaaaatagctgaagattaaggcgaattaaatgcagtgcctctgggatgtctgatccaaatttgtttttaatgacataattgtcacatattacatctgagattacatcccagtgaactggctatctgtgaggttatgctacagaaaacgaatttcccgtgtcaaaaggaaaacaagggcggcgctaatgttttaagggcgagggtgaagagggggagaaaattttgttgagcccagtctcataaagtgaccaggaatggctggtgacaagaggaggctgacatgtgctctcaatggatcttaaatcactgcaaggacaagctgcgacatcttctcagggtttttatttgcctaatttagagggtagaggtccttcccaatcatgcaaatcaggtcatgcccagaagcaaccgcgaagaataaaagataaggagacacaagtcctatgtaaatgtttatatttcattgtaaaagaacaagacgtgaaattcctatttgttcctcaatttttttaaagctaaaagtaattgcaatattttcttcctctagggccttcccttccacaattaatctttccacaccttccctcctgtgattattcccccaagctttaacaacagttgactaattcacagcatttctgcttcaaagctttcaaaacactgtggggtgggggtgctggcggaggcgattgcttggctccacaagccacgccctttccttcttaaaaattggttatttttgcagtatgttattaccatctatcaagaacacactcctgtaaggaaacccaacttccatgcttcactcaactggtaaattctcaactcttaggatgctgaacacctatacttcaatgtaaataaaaacacaaggtttgggccgtgagaaatgtttattctctactctttcaactgtagtacccaggtcctggataccagagccaatcgagcaattgaaagtctcaccagccgttcgtgtagaggaaacgctttcaaaatatatcattcatcttcatcttcgatagcagtttatccatatatcctttataagcatcattaagtattggtgcttaagatctctgtcacgaggtaagctttcaaatttataggtacatgcgctcgtggaggggcaaagggaccttttcttctatttattttttcttttattagaacaaaaggcagcttgagtacacttcaaagtctgggagttgctgtttgacaggcaggctgcctttgagaaagccgttcagtgcattaaattaaccgactcctggccaaatcaaattcaaggggaaaagtatttcccatgcctagagtgacaaacggaattacgaggcacgcttaagcagactgtcaaacttttatgtttacttaaaaaaaaaaaaactccacacagatggaaaagtctggtccgtggcagccttgtgtgccaggagaggctcacctgtacacacaccacaggcacgggtctttcccgggctgtccgcactgggggaggggatgggtggacatcgctagacctttgtcccgggggcctggggagggacgactttctggaggcttcgcagccacctgcactctgggaagccacacacagtgtggccctccggggtcgtcctggggcgagctttgtgggtgggtgggagcatgggcgttcccacctcgggggcggcgggtggccccacgctctggctgggatggggtgagccaccgctccgtggattcagagtgggaaccccgactagatcagctctgggacaggcccagggtgaagcggccccgccgcgtccgcaccgccaccgtgaggccgtgccggggacggtgccccgtggaggtggcgctgccgcttcgcgctcatctccccgcccgtctccccgccgccgctgccgccgcgccgggctgggctcgggcgggggcatccgctccggtctccccgcgctttcgcgctcccgcttcgcgtgcggcggctcgattccggggagggagtgagggaaggggtggaggtggcggggggaggccgaggggcgnnnnnnnnnnnnnnnnnnnnnnnnnnnnnnnnnnnnnnnnnnnnnnnnnnnnnnnnnnnnnnnnnnnnnnnnnnnnnnnnnnnnnnnnnnnnnnnnnnnnnnnnnnnnnnnnnnnnnnnnnnnnnnnnnnnnnnnnnnnnnnnnnnnnnnnnnnnnnnnnnnnnnnnnnnnnnnnnnnnnnnnnnnnnnnnnnnnnnnnnnnnnnnnnnnnnnnnnnnnnnnnnnnnnnnnnnnnnnnnnnnnnnnnnnnnnnnnnnnnnnnnnnnnnnnnnnnnnnnnnnnnnnnnnnnnnnnnnnnnnnnnnnnnnnnnnnnnnnnnnnnnnnnnnnnnnnnnnnnnnnnnnnnnnnnnnnnnnnnnnnnnnnnnnnnnnnnnnnnnnnnnnnnnnnnnnnnnnnnnnnnnnnnnnnnnnnnnnnnnnnnnnnnnnnnnnnnnnnnnnnnnnnnnnnnnnnnnnnnnnnnnnnnnnnnnnnnnnnnnnnnnnnnnnnnnnnnnnnnnnnnnnnnnnnnnnnnnnnnnnnnnnnnnnnnnnnnnnnnnnnnnnnnnnnnnnnnnnnnnnnnnnnnnnnnnnnnnnnnnnnnnnnnntgcttgcatctccgcgtcctcccccccccctccccacccctccgccgttcgctggcgctcgctttctctgtgagggtcggactctgcgtctatctgtggtgcgcctaccctctgggttgttttttttagggggagatatttctcttttttctccttcggggggtgtcgtgaagattccactggaagaggagtccctttaaagggacagagaccttgtctggagtcttacctggtctcatgagtcccttgtgtggcgtgcagggcgggttccgtccaattgttgaaactcctcattcgggggccagggtgaggtggtcgagttggggatcccgggtcgctaagaacgtctctgaagggggctgttgggggtactcggcagtgtgtgtatgggaagagttgtgtacgtgaggaaactcccgccaaaaaaaaaataccaaccctggtctagttgttagctccttgtaggcgaaactcttggtttcccctggcagtagcccagctgggtcccatgggtttgccccctgtgatcgcatcgcgggagccccgaatggggatggagacgacttctgagactacaggatggggttcttgtagattcttcaaaatcgatactgaagtgtgtgtttcctctccagaggctgcttgcctttggagaattggggaatggaatctgttggctgggactacttttgagaccttgaggttggtacgggatctcgtgccctcagggcttcgggttgaacagaagtgcggtaaaggtcctttagctccaaatggtggtgtatgcctgcctcaggttgctccacagccaggttaacttaagtcacaccttgggactgagaggcctttacactgtggttgtcaatggtgacttattgatcatccttaagaagtagatatttctgcccttgcttttattacatttttattttttttaaattttatgtgcctgggcatgttgcctgatatatgccgggttccccaagaattcagaagagggcttccaataccctggaactggagttactggagttgtgatccacagtgtgggtgctaggcatcctcttaaatgctgttatttttccagcatgcatatatatatataattattattattaaacaatatgtgtattggtgttttgcctaggaattgaacctgggtcctctggaagaacagccagtgctctcaactgtgctgagccatctctcctatgaacattttacatttttagagggtctcgctatgtgcgttgctagtctgaaatactatatagatctgcttggcctcaaattccacagagaaggcagtacttaagaatagcgcctctgcctccagagtactgggctggaaagtgtgctagtacaccccaccccacactgttttattgatgcactgtggaggcagagaaattcaaagctttgtccaggttacacaggagcaggattagaacctaggttggtgcagaacatcctctctctagagctctccgagactcttggtgtttgtagcctctcagcttgctaggagatctggattcacacatttttctgagcttctgttttctcgtggctgaaatggagatgatgtctgcacagtctcttgaggtagttgtgagaaagattaaaaagaaaaggccattgtagtttgttaaagtatgctgagtatagccatcctatcttaggtcttcctggtgaggatggccttggtaactgcctgcagctgctccttaggggcagagaatgctgggggaagcaccctgggtagattagatacaagtatcaagggagagagatttctgtggtaattgtaggtggagaattcgcctcagataaccccccaatcaacttgtccttgagttcaatgaagaccttagacagactacttaaaatttaaaagatttcttagaggcattcccagcttgcaaggtttgtggttggaaatgccccaagtagtattgcagttatcttaagtactgccttctgccggaagtacctagcatattatattatttatagtctgaagcatttcagatgtctttactttggacagggccaagagatagggcttctagccatgagatgtctctggagatgttttagatctgtgattttgtttatttatttatttatttatttatttagataacaggttctcactctgtatccctgcctggcctggaattcactcactgaagtaagcacacctacctgtttccacctcccaagtgctaggattaaaggcgtgcaccgttaaagccaacactacactggtgatgatctggtcctctgatggaactcattcattgtttatcaagcttgaaagtggatgatattcttaattgtcaccaatattgtctttgcctccccctttttttaaaaaaaacaaaaacaaaagaaaaacaaagaaaagaactatgatgttagccaggcacagcctacatcctgagttctaggacagccaggactatgtagagagactatgtctcaaagggtctcaaagaaacaaacaaacagcatggtcttgttttgttgctggctttgacctcaatcattctgacctagtatctgtcttctgaaaccttacgcattatctttcccataattaacctgtttgattcactgcatggctcattataatactagaccttatctcgtgtcatatcctaaagatctgtgtgcatttctgctctcttagtgagataagactccttgaggacagagatcttcagggatggggaactggcccagtgagtgaagggcttactgtgcaagcctgaaatactgagctggatccccagcacccacccgaaagtcaagtgcaaagtgtttctctaactcttcaagttttgggtgtagtatattggcctcagacccacaagaaacctaactattcttgtctttgtcaaaggcctggccatgtatccttaaacttatttatatcagtttttatctgtttttcccttgggagagagagagaagggtaaaaggagagagacaccatgggttaggaatcaagaaagcacagccgtgagggctggcaattagagttaagacctgcccagataaaatatagtaataactcggggttatagagggtagatatctggccagctatagtgctgattaaggcttactgtacgtaataaaagttgtgtgtcttttatccaaaaactaaatgatcaaaggtggggtaaaaaccccaaactgaactacattctccaactgttgggggacagagacacatagctctcagctgctcattgaccagtgtctaactgaaaccctgtggctcatgatcgaggaagacacctgacttcagtttctgacttccacacctgctggagtggacaggtgcacatgcagaaaccacgcatatatatacaccatgcacacagacacagaagtgtgtggtttaatcacttagcactctcgagtgctcgcttatctaccttttcagactcttcctagcgaatgagataggcaactccttcctccatgaagttcccattcagctagaagtagagaatactaaacctagtaagtaggtaaattatgtagcttagaagatggtgtcactaaaaagtaaataataggatgaaccgcctattgctggatgatgtaagggatttgtaattttttttttccccaagacagggattctctgtgtaggcctggttgttctgaactccattctatatatagaccaggctgggctcgaacctagagatccacctgtctctgcctcttgagagcttggatttaaaggtgtgcaccaccactgtgcagctgggatttacaattttaaagtaatcagatgattatcagtgatgtttgtaaagagaggtgccgtgtgaatgctttagagcaactgttctcaacctgtgggtcttgacccgttttatagggctcacctaagatcattagaaaacacaggtattttcattaccaatcataacaatagcaaaattacagttacaaagtagcaatgaaaataagtgcatggctggggatcaccacaacaggaggaactgcattaaagggtcgcagtgttaggaaggttgagaaccacggctttagagggatagtgcttacacaggaaacagatcttttggtgtccattcaaatggacaccatatatgaatgaacgcatatagcaatggatatccagctcacactcccgtggccttctctccttaggtttgccttcgtggtttccagttgccatgaggaagcctcgccgaaagtcacggcagaatgccgagggccggagatccccatccccatacagtcttaagtgctcacccacacgggagaccctgacttacgcccaagcccagaggattgttgaggtcgacatcgatggccgcctacatcggatcagcatttatgacccacttaagatcatcactgaagatgagctgactgctcaggatattaccgaatgcaatagcaacaaggaaaacagtgagcagccccaattccctgccaagtccaagaaaccctcatcaaagggcaagaggaaggagtcctgttccaagcatgcgtccggtacctccttccacctcccccagcccagctttcgtgtggtggatacggggagccagccagaagcgcccccattgcctgctgcttactaccgatacattgagaagcctccggaagacctggatgcggaggtagagtacgacatggacgaggaggacattgcctggctagacatggtcaacgagaagcgccgagcagacggccacagctcggtgtcggcagacaccttcgagctgctggtggaccggcttgagaaggaatcctacctggagagccgcagcagtggggcccagcagtccctaatcgacgaagacgccttctgttgcgtgtgcctggacgatgagtgccacaatagcaatgtcatcctgttctgcgacatctgcaacttagctgtgcaccaggagtgctacggcgttccctatatcccagagggccagtggctatgtcgctgctgcctgcagtctccctctcgtcccgtggattgcgtcctgtgccccaataaaggtggggccttcaaacagaccagtgatggccactgggcccacgtagtctgcgccatctggatccctgaggtctgcttcgctaataccgtgttcctggagcctattgagggcatcgacaacattccacccgcccgctggaagctaacctgctatatctgcaagcagaaagggctgggcgcggccattcagtgccataaagtgaactgctacaccgctttccacgtgacatgcgcgcagcgggctgggctcttcatgaagattgaacccatgagagaaaccagcctcaacggcaccacctttactgttcgcaagactgcgtattgtgaggcccactctccaagtgtggccgttgccaggagaaagggcgactccccaaggagcctcagtgaagtcggggatgaggatgggccgaaagagggtggaggggaggaggagcaggaagaagctgaggaggagggccaggaaggccaaggtggggtgggcagccccctcaagggcgtgtccaagaagggtaagatgagtttgaagcagaagatcaagaaggagccagaggaagctggccgagaggcaccctccatcactctccccatggtcactgtcccacagataccctcttacaggtgagcctcatgagacgctctcttgcaggactcttggtttgttcttcacagtagcccaggtcttccccacatacggctgatggatgcctggtctcctctgctcccaaatggagcctggccctgtgttgtggttttgtccctgccttcagagtaatgtgtctcctttagttctgagtgacataaatcatttaagttgcttgataacactgatgacacagtgtaactaaagtggtagttttcacagtggcactaaatggcattgtgaacaggataattctcgctgttaactctcccacggattgctaaatgattatcatctctggtctttgtatgaacatgctgtgtccttatactgcctctgtgacaaccccaagggctcacactggattccagtgggaagcctgcaagtgttaacactgttcacgagggatgtatgtgggtggggcagccctcctcttgagaagctttagatgttgggaaaagtggagttttagagccaagtctccagcccctccctcagagtcctcagagagagcactgcacctgggttaaaaattgtcagtttagccggcggtggtgacgcacgcctttaatcccagcacttgggaggcagaggcaggcagatttctgagtttgaggccagcctggtctacagagtgagttccaggacagccagggctatacagagaaaccctgtcttgaaaaaccaaaaaaaaaaaaaaaaaaaaagaaaaaagaaaaaaaaagtcagtttagtagctggggggtacggggatggggtggggggagcttagcagggaacattttccagcagagcccacctcaaggctgattcctttaaaaggtatacaatggtagctgtggtgctacacacctttaaccctagcatttgggaggcagagtcagataaatctccagaagtttaagtccagcctggtatacataatgagctctaggccagcgagggctgcacagtgagcccatgtccagaaacagcaaaggaaaggaagacaaatgtacagccttagaggaggagggaatcttggaggcttttcatctaatgtagtccttgcaccttctcccacattcccagatgaagaaaccacagccacgggaggtaaagttgctctctcctttgttcatgcgatgaagtatttattgagcacttactacatgccacatcctgttctaaggtggagaagggcagcttctgggctgaaagtgctaggctctcttgattggaaggttatgggtaaaagagcatctggcggcttggaggaaactggcactgtgaggagaaccggcagccagacctgccacgctgggaaggtacccgagcaagatcgggacgggggctcttatttcgagaacttcagcaactctgtcttcaagacagagctggtcttggttacctctttcttgaggtaactgggtcagtgcttagtccccatttgtacggtggccttgccctagggctagctcttggttgtctgtcatagctgtttgagctgcctttcccagaagccagattcgctggctaagaagaaacacaccacgtaatacttgtgtgacctttggtaagttatctaattgctctaagcctgagtttgtgagcaaactcaccagatagagttaagagaaatctgagtcaaagtcttagcacagtacctggcaggttgtaagtgctcaataaatggtggctactgctgctgctgctgtgttgttttatccccaccccacccgcacaaatgctgttgaccccaccatggccagtaggcagagggaggggctggcctgcaagtgggcaggtgtgcttggcatgggtgctggtgggaaaaggcctaggtaagcttggctttgggcgaggacatctgactagagatggaaggcagggagtggcagcgtccaccctgcttgccccatctttcttaggttttatctcgattagctacagttagctctcctcccatggagtgaggcaaagagataaagcagaggggcactggggccttgcttaccttgggcgtggactatggtagtgaagaggtcaaggcgttggatcccaagtggagccacttgtcttcttagctgtgtcaggagttggcaacccagcctgagttcctcatgtgcctgttattagtgggacagtgggggaggggacagtgctgttgtccctgagggctcattagatcctttcctgcccagccccagagctgttacatagctgtcataacccagagacccgcctgcctctgcctcccaggtgctgggatcaaaggcgtgcgtcaccacgcccggctcctataacccagatcttaagacctcacttgctggctactttttaagagcatctatcctgtatatttatctatatttagattgttgttttctccttttccctttgattgcctaaaatttaggcatttttagggtgctaagagtttttaaatgataaaaatcagaggtcaggtggctataatctcagttacttgggaggttgaggcaggagggtcctaagtacaaggccagcctgagtagtacagtgagaccccgtctctcacgaccctgcatccgcacacaaaacccctcagaggtcacattactctgagggattacgtttgggtacagaaagcagtaacctggcacattttctttgagcttggctgtgggctatcccagggtctggcgaggtcctcagccacaaaaggcagggtctggcaacacagcacacagcatactcaaaagcttgttttctctgtgctgttgtcagaaggaggctgtgggttccggagcacaggcctgtttctcagtaccttactgaaagttccttaacgacaggcagtagggctgagagagggttccctcagaagatcagttctccaaggcagccggagaagcaggggaaacatggccgctcggtctctcgtgccgagctgcctaactctgctgtcttctccctgccttcccccaagctgagacatttggtcacttccttctgttttcctctgtaaggttgagaaatgaactgagatctgaatgggatgtacagcgagcggcgtgtatcccgagcttcccactgacctgtctctcactcccctgtgcctctgcccaaggttgaacaagatctgtagtggtctctcctttcagaggaagacccagttcatgcagcggcttcacaactactggctgctgaagcggcaggctcggaacggtgtccccctcatcaggcgcctgcactcccacttacagtcccagagaaatgctgagcaggtaggtacgggtgactgttggcagcttgtgaagaaaactggggggacaggaggagatggtggacgtgagatggtgccaccactgccgcctccgcctccgcctccgcctccgcctcccaggaagcctttgccaatagcagatcaccctctgagtgatctgtccagaagagtttaccagcaccgcagagatcttcagacctggcaggggtctcttctgaagggagatgttttacatagttcctgcactatagataacaatagagaacgctaaactgtgtcattaaggaatgagaacaaagccatttcctcttgaattcatttggtcaaacttcagtttttcactttcctccttgcgtcttccatctctctggcttatctgtagtctttctgttgcctggtgtgtgtgtgtgtgtgtgtgtgtgtgttttgtctgttgtgcctgtgagttatacctgtgtctgatgtctgccctgcctgtacctaacagggctttcctctgtattaattgaacagcacagaaacaatgggatggggaccgaatgagagattctggttggttggttggttgttagagatttattttgtgtgtatgagtatttggcctgcatgagtgtttgtgtaccatgtcccgtgtctgttgctcacagagaccagaagagggtgttggctggcctgggactgaaattataaatggttgttaactacagtgtaggtgttgggaaccaaaccctgttccgctgcaacagtagcccgtgctcttaagtgctctgctgtgtctccagcccaagtgaaatgattccttacagaacaattagacagttttatcaggaagaagtcattatatcttgacctagaaacactcaatactgcagatagaccttaacaagctatatccacatgttgtttttaaaatttatggatatttaaggtcatttctttcttttttttttttttttttttttggtttctggagacagggtttctctgtatagctctggctgtcctggaactcactctgtagaccaggctggcctagaactcagaaatccgcccgcctctgcctcccgagtgctgggattaaaggccgccacgcctggcccttaaggtcatttctaacctgttgactgttttcagcaaatgattatcacagcacacacacaactgtgtcaaagacatggaacagaacataagatgaaagctatgcttaggttataaaagttgattgcataggaaatccaacagtgacactttgttctcttaaacctaaacaggctaagtatatagtaggacagcagattgaatacatagactcagtgatctcaaagcatattattcactgggctgtagagtttgccaaaagtttagtctctttgaggccaaaagatagctttgttaaaaaacgtattgttgccaggcggtggtggcgcacgcctttaatcccagcacttgggaggcagaggcaggcggatttctgagttcgagaccagcctggtctacagagtgagttccaggacagccagagctacacagagaaaccctgtctcagaaaaccaaaaaaaaaaaaaaaaaatccacacagcttgactgaaggatgaactccaggacagcctgagcagccagcccagtgtcatgtcatagaagaggtggctgggtgagagcagagtggcccaatttcgtaaaataagaatagatgccctttgcccttcagcttctcatagtaagtatgcaggcgacggcccagcccgtggtctgtagcctgtcccacgtggcagccaccacatgcttaggtagtgttttctgctcctgcttagttccttccccttgcccacagcactagttagttctttctcacctgctccatcccatctgccttcggatcctcccacgccgctgcagagaagcacaaagttcacctgacccatgcctcgagcctcccgtttgctcactctgcctgagcctgagtcacaggccaatctaatctatctggcctctcttcaacctctgcttcctgaagtctctacagcattagcaggctcctcccagcaagtcctcacattgccatcatggatctctgtgtccacaggtctctatgcacctttacagccttttttgatttcttcgaggtgtgtgagtgtgtgtgtttatgtgtgtttgtgtgagtgtttatgtgtgtgtgtttgtgtgcgcacacacagtggacatgcatcttgtgtgtatgatgacatgcccaccaggcgtcttccaggctctgttactgaattcagtgtttggctagattggctggccagcatgtcttctcctgcatatgcagctcttagcttaccctagcaagccttcccagccaaacctctccctatccagacgcctctctgttttgtattctctcagcagttaaaaataaaaaggtttagctggtggtggtggtagcacacagctttatcctatagcactggaggcagaggcaggaaggtctttgtgagttccaggccacctggtttccagagcaagttccaggacagccagagctgttacacggagaaactcagtctaaaaaaacaaacaaacaaacccccaaaaaggtttatttttttaaattcttttttttttaagatttatttattttatgtatgccagtacactgtagctatacagatggttctgagccttcatgtagttgttgggaattgaattttaggacctctgctcgctctggtcaaccccactggctagggtcggccctgctctctcagtccctgcctgctttggcccaaagatttatttattattatacataagtacactgtagctgacttcagacacaccagaagagggcgtcagatcccattacagatggttgtgagccaccatgtagttgctgggatttgaactcagaacccttttgaagcgcagtcagtgctctaacccactgagccagccccgtttattttgtttttaatttgtgtgtgtattataaatgtgtggggagtgtgtgtcctgagacctggtacctcagaggccagagggggttctctcagcattctctacttcttttatggcccaggttttggttcctttaagctgtcattttcctgtgttgcaaatccctcagcaacagtgcccacttctggaacaggattcactgatttttttttttttaaggtttattttatttatttgtttttttacttctcaagtgtgtgtgcctgtgtttaaacactaagcaggtagtggctgccactgtgtgcaggtgcctgtagagaccagaggcatattcctaggagctggagttagaggaagttgtaaatcagtcctgtgcaagagcggtacccaccctctagccccgcatttgctgattttcactgtttgaccaaactattttttttaaagatttctttatcttatatatgagtacactatcactgtccagacacaccagaagagggcatcagatcccattacaaatggttgtgagccaccatgtggttgctgggaactgaactcagaacctctggaagagcagtcagtgctctaacctgcagagccatctctccagccctgaccaaactattttaaacctccatctactagtaagaacttcactgttttctagccaaggcaaagctgtagggtgcgattccttcaaccccttagtcttactgagtttcttcagaaatgctttccagctgtgagggccatggccggccagcggtgcccctggggctggggaagctgtcagaagcctctcttcagtttgttcttgtagtacagtgctgaagactcactctagcaccaggaagcccgggcccggggccctgagcggtgctggggaagggccttcagcaacctcagggctggcgggaggctgaggcaaaaggaaggagaccacagcccccttgttcttgccttgcttagcgggagcaggacgagaagactagtgcagtgaaggaggagctcaaatactggcagaaacttcgccatgacctggagcgagcgcggctgctgatcgagctcatccgcaaaagggagaagctcaagcgggagcaggtaagcagagccctgccaggccctcgctggctcccctcactcctctggggccagcattctgtgtccctctggtgctgagcactgtgggctccacgctctgctcggttggtattgggtggagtgctcctggaggcatctgtgtttcgcggttcaactcatttgggctggagcctgtgcctagtcccacgtgcctgcgcccttgatggaatgtctgctttagaagtgtttggagggactctgacctgaatgttctgaaaggcttctggcgcacctctgtggcattgctaggttctcctggcctgtaaggagctggagtctcagtccaaggacattcaaagtcccccaccacagggcatggatacagcatagcatgtggttcaggagcatcatgtgtgctgttgctggaccgggtctaaagcctggcctgttactttctgtttccataacattaaacaaactttaatctctgtatacctcactgttttctcatctttaatagagataacgacagagctgacatcataaagatagatgaatttatatttgtcgaagttgagaatacttagtacctggcacatagtcagggctggagaggttgctgctgttgttactaatggtagtactggtcctctgccccactggggtgtctgtgagagttctctgcacatggcacagagcaaatattattaattgaacggatgacaagcccaaactgttctctctagtccaagaatagcagctgttactcgaatgctttcgaggggtgggttaaaattctccctcctcctgccgttcagttcaacagccacacgcccctctctgctaggccagcagcttgagctccactccctgtcctgggcagctctgaactgcgtctagcctgagtgggcagggaggacatcgcaagaccttcacaggtcaaactgtaattgtacccaggcttggtcttatagcttagattgtcttcctgcctcgggttcataaaaaagaggaggtttatgttgatgtggccaagagcaggagcttatctgccttactggtggctgtgtggtatttcctgtcatgcaccctgtaagatgacattggacagggtaccactgtagctctgctgagcctggactccccagtcaccctggcccacagggtgagctctcagtgcttatgagatacatgtgtgcttacatttggtcagtgcgcttggactaaggcctgggctcaatcacttctcagtttgttttccaaccaggtaaatctgttaactcactcgtgtcaccaaactccatgtaccagattctaaagtgggagcactaatctctgcttccgttgccatgtcattaactgagataatacagggagagcagcagtgtggcctaataatggtcaggagttctgtggaaactgactggagccccacgctaactgtcctgttagctctgtgatctggagccagtctcttggtctctctgtgactcctcttcctctgtgtgaaatgtctgtcaggacctggaccctcagtgttacaggagctgcttagacagccccacacacccgcccccaggcacacatctacacagaactaaacggaaatctttagccgggtgtggtggcgcacgcctgtaatcccagcactcgggaggcagaggcaggcagatttctgagttcgaggccagcctggtctacaaagtgagttccaggacagccagggctacacagagaaaccctgacttaaaaaactaaaaaaaaaaaaaaaaaaaaaaaaaaaaaaaaaaaaaaaacaagagatctttaaagggcttaggctgttcgttgcgacctagcatgagttattactggtgttagttactacagtcgataattgctatgacttcggtaagttgtggtctggttcgtgatgagtaggaaacatttgtaaggtggctattctgatttgttcactgccaccaggataggttatcacagacccggccatttccaaagggaagctgatttggctcccagcgctggaggctggaagtaaaggcatggtggcaggctggtgagagggatccttcctgcagtctgtcgcgacgggaaagcacccgagcaaggggtcgcacatgggagttggcctcaacagcagtcactcctgggagagcccacttgtaggcctcctgatccgtcctgggggcaaagccccaggatgccagcacctctccaccctcacacactgggagttgtgactgtgacacgggacctgcactgcttgtgtgagcttcaggtggggtggcgggtgtcaccccttgcagagatttgttacacctgattgacagcaggtctacactctgatcactcctactttcattgcaggtcaaagtacagcaggctgccatggagctggagctgatgccgtttacggtcctgttgaggacgactctggacctgctgcaggagaaagactctgcacacatctttgctgaacctgtcagcctgagtgaggcaagttgcccctctaggcacgaagtctgttctggaaatagcctgaggagagcaagcaagggttgcactgcgggccattcagaaatgagagtggggagctggtcggctggccggctggtagacttgctcagggtgtggggtctgtaggagggctgggtggaccaggccctgaggctcgtggtgagcccgacatggccacagcagagagttgggaagccaaaagtagcagtgaagggtgcgcccgtgaggctcataaatggttgttgtaattgtacaggttttatatgtttaggttccagattacctggaattcatatccaagccaatggatttttctactatgaggcggaagctggaatctcacctgtaccacaccttggaggagtttgaggaggactttaaccttatagttaccaactgcatgaagtataatgctaaagacacaattttccaccgagcagctgtccgcctccgggacctgggaggggccatcctgcggcacgcccggcggcaggcagagaacatcggctatgatcctgagaggggcacccacttgcccgaatcacccagattggaagacttttaccgattctcctgggaggatggtgaggagcctggatgggtagagaggagaaggaccaggaagagaggcacaaggacagggcccagacagcccaggatcagggtgggccttgggggtacaaaagctgtggctgggagcacactcagtgctgtgagacaggtgtttctgtgtatttggaaagccaaggcctctccaggcatcttctggatccctgcagtgtggctctggagcctcgggtgggaggaccaggaagtagagaacttcagagcaccgcactctgcctgtcccctcttgctgcataatcactcaggccagggattgataagtctctacgtggccgcaggcataactgggacttgcttcctgcacgtttcccaaattctgctctgtcccttctaggcagcagtgttgtagggccaaggcccatactgacactgctggaagtcactggcctagcccttccaggagcgtagtttacatccaaaagatgtcagcccttttcgctcaccctgtgctgggccggtccttcagcctctttgtcctccattctccctggcagtggacaacatccttatcccagagaaccgggcccatctgtccccagaggcacagctgaaggaactgctggagaaactggatctggtgagcaccatgcggtccagcggggcccgcacccgtcgtgtccgcatgctgcgcagggagatcaatgcccttcggcaaaagctagcacagccaccgccaccacagctcctgtcactgaacaagactgtgcccaacggggagctgccagcaggatctcggggggatacagctgtcctggagcaggctcagcaggaggagccagaagaggaaggggacagaggtgagagagtctcaggcaggcaggtgcggggtggtagggagtcaggaggaggaagaggctgaaatctctttagagtatcctccctgagggtaggcaaagccctcggaagtggtggtggtaggggtgtccctgtgttcccagggctgtggagaggttcagagaggttagggtgcccagcagctccccagtacacagttacacctgaagcatctttgccgctgatgcattgcgtcttccagctaagccagcctgctttctatcacgtgtgcagtgctctgagaacaggctacccttggctgtgggaggatgagcagagaagtgagcaccttgcttgtagccttgaatcccagcagaggagtcagattaccaaagaccgcattgagaagcaggtggctttctcaagtggaagttgtggcagccaacagccaagctctttcccactggtgcctgcccttgcatcagccccaggtttggggagacctgtcactcacagagcctaaacatgggttttggtagggctcaaattggagaaattggcccattttattgtaggtccaagacatggtagagaagccacatgacatcagaaggctatgtggccattaactttcacgtggcagtcagcatgtcatttgaattccactgcctgaccatggctaagcagggtcataatacagtgggccagttgccctcacatgacccagacggtttcctggtcaagtctcagaggttcttatagggatgtctgggctgtggcttgtaaaatttcaaatggagcagacttgtttgagagctgctgagttccttatgtctgcaaacactctttctgcccgctgggtgttcacaaaccagaactgaggacaggtgtgaaaaccccaaagtctgtgagaatttaatcctctagtctgacgagctgaagactcgccttattggctacaccagtggctttctcaagcatgagtgacatttgaaatacaaaccaccaggctcactttgtaagccctcttccctttgtgattccctttcatttggtctggttataacttaggcttagaattcttacaaaacttctagttcagtgcctagttcagtgtgtctcaacctgtgggtctctaccccgttagcaaatctctatctacaaagatatttacattatgattcaaaacagcagcaaagagccaggcatggtggcgcatgtctttaatcccagcacttgggaggcagaggcaggcagatttctgagtttgaggccagcctggtctacagagtgagtttccaggacatatacagagagaccctgtctttttttttttttttttagtttttnnnnnnnnnnnnnnnnnnnnnnnnnnnnnnnnnnnnnnnnnnnnnnnnnnnnnnnnnnnnnnnnnnnnnttggtataaatgacctcctggaatgacttgtagacagggtggcctcgaagaccctgtcttgaaaaacaaaaaaaaaaaacaaaaaaacaaaaaaacaaaaaaacccagcagcaaaattagagttatgaagtcacaactttgtgattgggggccgccacaagaactgtattaaagggtcgctgaccaagccagctcagtcagtcagcagggcctcggggaagggagcaaggatttaagagataattagacaacattatggtatgacctctgcaagtgctgaggctggtttatttttctcagtctgctttgataccattctagtaacatgcaaagaataggggcagtcctaggccaaagacaaagtagtcaaagaacaaaggaggcataaacaaagatcccctgattactgtattcagggacttaataagaccatcaggatccaaagaaatcattcctcagctgtactcatcctgagccttgcccagtgtcacattcctacctgagcctgcttccttgtcctagcctagtgtcctcattatttattatttcactttttattatttattatttattccttttttacttcctaaataagacggcatctgtctgaggctcttctgacaagaatgccttccttaacatcattgaaaatgcattatccaaagcagtgcgctcctgtcttagttggcaaggctctgtgcagactcttaaccatcattgtctgccagcccgccagctagtggcactgtctagggatccatttatagtttcaagccatgtattttgtctgccaacatgttgatgttgttaaaggcatgttgtaaatattcttgccaatatcttaagtggcaccaagggctctccataggtctcagcattgcgcaggctgagaaccactgtcctcgttgattcaaacgcgcagcagggattaagagctcttgggtctgaacagagctcacgcctcgcctccttttatctttgcttagatctgaggcctaagaggagtcaaagctgtggtccttgcttatcagagatggtatctgactggtaggagcagactgtttctagaatgttcaagcaggttctctttttctctaacagatgattcaaaattgcctgccccaccaaccctggagcctaccgggcctgcgccttccttgtcagaacaggaatcccctccagatcccccaaccctgaaacccatcagcgacagcaaaccttcaagccggttcctaaagtcccggaaggtggaagatgaggagctcttagaaaaatcagccctgcaactggggagcgagcccttgcaatgcttgcttagtgacaatggcattgacagactgtccctcacaaaccccgacagccatcctgacacccctctcggcaccgtgggccgccgaacctccgtcctcttcaagaaggccaagaatggagttaagctacagaggggtcccgatgggacccttgagaatggcgaggaccatggcccagaggacgatcctgcttctccagccagcacagaggatgaacactattcccggaagcggccaaggagccggagctgtagtgacagtgaaggggagaggtcccctcagcaggaggaagagacaggtgactcttcctgcgacttcttttcttatttcccatctgctttgctgctttgccttgacagggagcactctcccctgccagcaatcagggagcactctcccctgccagccatcagggagcactctcccctgccagccatcagggagcactctcccctgccagccatcagggagcactctcccctgccagccatctctagggtcctctgtgaggatacaagctgagagcagttgtctttagattgtgtcttaggctgtccctggccttaaggggaatgcaagactttatgatgtcaaatggtctctagctttccttccgttcactcttgagatattttagatactttctttcagacactgtcttaggcactggaggaaaattagtgaacaaaccatggaactctcttccaggggaaatagagactgcgggcaagtgaggcctctcatatttgaagctcggtgacatcaaaataaaaacactggtcataccatcagagaagagggcagagagtgctgggtggtatgagacagagcggccagggaaggggacatttgggtaaagatctgaagaaaccgaaggacgagctgcttgtgtatcttggggaagaatattctaaaaaggacagatgaacaaataccttggaggtgggcacacacaagcctgtcccatagcagaaaggagccagccgcagcaatgttgccggcggaagggcaggagaggaggtcacagagtagatcacagggctaggtcactggagtcctcactgcagggtctggtctctgatgggagagggtagtcagacccagtgccggctccacgagggtcccaatgcagtagaacacagagcatagggtgctcagagtgtgggctcagggagcttgacctgtgcttgggagggcttctcttgaaggtggctcctgaagctgggggcagctgggaaagggtagctggtgtgaggggccccgaggcacatggggggttacctgccaggcaggcctgtttggttgtggcaaggtaggaaggctgctcttgactgttgttctgtcacatgccctgtctgtggtagctgccattgtgtggccactgcttgctctctcctctctttctccccagcacagccttgccttcccctcagccatgcttctctgtgttaggccagccattcaggatggtaaagctgagttctcaccctgacttcctatcgcctgtcctggagggatgtaccctttctgagcttctttccttcttacagaggtggagctcgttacacttaggttgaagggctaaggttagaatcgattatagggaacgctgccaacggtagcagctactgtcatcttttcagttgtgtgtgtcttttcagacagctgaagatgattgtagcaaaaaatgaaggaagcccaccgacctggggcctggcactcggaatacagcttagttgtatacagcctgagctgcagctcaggaggcaggccttgatccttcacaggcacggcacagttgtgtccatgactcccactgaggtccttatgttagaggaagcatcaggccaggactgaggcatcctgctcaggcatctgctgtcacaagcatggcaggccttgctgctttctagccaatgtgtctgacagttcttaaatcggcggtctggtcctctgtcagccttggttcagcgatcagagctgtgggactcaacagatggagcagaggaagcctccctggcatggtgctcctgggacagtgacacggctcaccccacgtgaggctccttgcaaagggattcctacggaacagcctctctacttcacaaaaaggggccaggatttgagaggctacctagcctggagccagggctctggtgcccgtgctactctgctctgggctgctgtagtcctaagagtctgcgctcttcaacgcactggctctgtgaggtagctctgggtgtggctgaccctaggcccttatcctgtcttagcttctgctgccattgccagctgggttggagagggcttgagagtggttatcagaagaggtaagactgtgtgtggctcttcaagaggcagaggacctccctgataattgaggtttgaaattagagctgatccaggtactcgtgagcctgacctggggggagaagccatagtttccctccgtggtcaggcatgtgctgacttcatcttctttgtggggagagtgaggaggtacagtctgctcactagctaaccttgtctctgtgagagtccttctgccacctgtgatacactccttacagggacagccacctacccactttggtcctccaaggcggcttcccacggggaggcatgtgtcagggaagggaggttctgcactcagggctcactgtgtgtgtccttggcaggcgtgactaacggctttggaaaacacacggaaagcgggtctgactcggaatgtagtttgggtctcagtggaggactggcgtttgaagctggcaggtaaggatgcttatcccccaagctcgggcagccttaagacttcttttccttcgttctccattcagtgacaggtcgggcttccttctcagttctccctactgtccctgtctctgggagccccgagggaaagggattggcccttgatttctcagatctgtctagcagaagagcggtgttgatgagtttgtgtagctcaatctcttgccgcccattgaagttgccatttgagaggcatgctccgggacgtgcgcatgcacataacccagcttgttgcagatgtggtgtcataggattggtctcttcagtttgttttggcttctgttcagtgagggttgaaccctgggccacacacctgctaggcaagtgctctaccagtaagtttcaaccaaagctttttttataggatcttgttgtgtagacgtggatggactggaatccaaagcatctctactgccttggtctcccaggtgctgagactaatgggcgtataccagtatgcctggatttagcccttggtttttgaaaccaagatgtagaactgaatggctcaaggtagcctccagcttaacccttgtccccttgcgtcccaggtgctgggcttacaggcatgtgtcggctacacccagtgcccacaactgtggcctctgtggaggtattacgtaggggcgagggaagaccaagtacgagcttttaaaggtcccctggtttttagaggcccaaggtagcctgccatttctgagaagggatgggcttctgttctctagctgaagggaggatttctcccaagtttactgagcttactgccctgcattttctgttctcccagactctgggtggagggggttgcttgcgtgaaagggcctcggtgccactgcagaaggtgactgctgagagggtccctgtttagtagtacagaaaaggctggcctgtgtctgaaggcttctgcagcaggtctcactggtgtgtgtgctttgaaatttcctgctgagcttccaggtgggcgtgtaggccttcagttacacgctggcctgtgctggcttcccacatcagtccctcccccacgaacctcaaaactgcttggctctctccctgtctatcaaagcctccagagacacaaagcaagcagatgcggggagagagtttactagggctaggaaatacagatttcaaaatattagaaaatgcttcttgcttgctctcaggttggagttcctggcttccttcacagacagtggcccatgtctgtaacctcaacacttaggtgactgagataggagattcgtgaggtggagaccagcttgggctttgtagtaaagcctgttcaatacaaaacaaaactccaataaagctacacaaatatgtaagtgcctggaaggtcagtttactggagctggggtaagattgaggtcagccatctgtcaccttccagcccttgctgaggtggaagggtaccgtctgcccttactgaagggcaggctcccatctgagtcatggaaacaagccaagcagcctgctggctcaggtgatgcttgactttgtgaagaactccagacagctgctacttcttgctttccccaggacttctgcctggtagaggagccatgcccttgaaagatatttcctctgtggtctggtgttcagagtttaagtgtgagcgactaggacccagcaggctcagtccccagaaccacacggtgaaagtagaaagcccactgcacaagcggcctctcacatccacacacacaggtgtgtgccagcgttccacacccacacacacgtgatagtaaaccataaaaagtgagtaagatgggaggcccaagttctgactgcagtgttctccctccctcctggagcctctctcctctccattctccagcaagaacaggagggaagctcttatctgttagactgaagccatattgtctcttgttgttctgggttgttgttgttgttgttttgaggcagggtctcttcatagccctgacttcctggaactcactggatagaccaggctggctggccttgaactcacagagatccgcctgtctccttgcactgatcactcacctcttgcccatttgctccatggttggtctttccaaatagcttttctgagcacctttccaatcattgtgctccacaactgtctcttatacgccaggttgtgaactcatgtgactgaggcttggcccccttgacctcttgattcttgatactctggctcctccttctgagttctaggatggcatttgtgccccaccacacccagcttcgagttgtggtgtgagtcactgttgttaaatacctgcagtttccgtagcttgtcttgtagaggagatagatggacattattgtctgaagtgtagactgggctggcctgggtctttggggaagtctgcaaagcaaaccccagtggcatccatccgcctcatcagaaccacacagagcttgttctgctgctgcaacctagtctgtgataccttaaatctgaaaacacgaaaccatccatccacacagagtgcgtggttgtgtgatcgtggacttttcgaagcaccatgggtgggccactgctcagggacacagaaggtcacaagtggaggcaggctacctggcttgtctttcagctgcctctccctgctcttctctgccatgtacatggagagggacttaggggaaccactagcatcttctgtctacacagccaggctccgagctgcatgggcaggtgtcataggctctgctggtgttgcttgccaaataggtaccgactgctttcctgagtgaatgcgagttgtggttttggttaagccaagtttttgcataaattgaacctcagttccacactctagctattcccagcccttgctgcatcttggattttctgtaaaaatttgactcatcttttaaccacttcttctagttgagaaattacagatcagtgatattatttatttttgagaccatcttactttgtagctcagccactgctctagcctcaagaatcagagatccctctgcctctgccttcctgctactgctattaaaaagtgtgtgcccatgcccagcagcagtagtcagcaatcgtagttcttaaagtttgatgagtatgggcgttcctagccacatcatttgttgcccagaaacccgcagctctgaatgtgtgttaaaactgcatgaggaactattttaatgctagcgttcctgcggtctcagtccagctcttcctgcctttgtataatattcccttccctctctccctctttcccttcctctctctttctttctttcttcctttctttatttctttttctttttttcgaggcagggtttctctgtgtatccctggctgtcctggaacttgctctgtagaccaggctggcctcgaactcagagatctgactacttctgcttctcaaatgctgggattacaggcatatgccaccatgcccagcacttcccctttgcatttgcatgtgtgttcacctgtgtcaccatgcttgtggaggtcagaggacaacctgtaggagttagtcccctcctaccatgtgtgtctaaggatcagactcactgctgatatcaggtgccgttatccactgacccacctcatcctctggactttacctctttgcagtaggtttgtttacagaaagaagctcgtttcctttttagttggggggaaactctatgcctacccaagaaaaccttcactcacaaaccattgggaagtgagaagtagatctatttttcaatttagaaatgtctttgctaattctggaaagatgtgcctgttatagaacatttggaaaagaggcagattttcagatctcaaaaataaattggctcctcaagaaatgtgaagcacagagtgcagattcctgcagaggtgagagggcctcctggtggcagcctgtcctgagaggctgaggggactgggtgactgaccctccccgtgttgctgttgttcttgctgggctcatggtgtagatctgtgattagagggtatgcgacaccacgcccggccccatggccttctctctggatgaaaccatcctctgcggcctggcagcaatccctccacaaggatggactggtttctggtaggaactcgcaggtcacatgcgccatgggttaatatcatgtaggcctgcaaaggaaatggagatgcctttgtctctgcctttgtgctttcgtagctccgtgtctgttagacatggaaaagcaagagtgggttggttccaactaaaaactgctcacttcaccctctactctgtgtgcagtggcctgacgcctcccaaacgcagccgtgggaagccagccctgtctcgtgtgcccttcctggaaggtgtgaatggagactctgaccacagtggctcaggtgagactatcgaggcagagctggggaagacatgttccaaggagcaagccgtccaagctgctcgcatctttagcttgtgttgtattttgagtttatgttgctgtgatcgtgatcatggtaaaagcaaacctgaggggaaggggttctcttcacttagagcctgcagtccatccactgtgaagcagagccgtggaggaacgctgcttactggcttgctccccgtggcttgctcgggttctttcttatatggtcctggaccaccagcccggggatctcatcagccacaatgggctgcgtcctgccctcccttatcagtcttctgttaaaaagatgcccactgacttgccataggccagtgatggaagcatttactcaatcaatagtcccagaggacccgtgtctaggttgataaaaactaaatcaaagcaaaaacactagccagcacagtttgaatagttaacatgtgcccatggaggccgaaaatccagaagctctaatggaagccagcattccccactggaacattggctgctaactgtgtggttgttttttcagaattacttaatggatattcaacctgaaacctgtgtgtgtgtttgagagaagtatagagggcccccattcctttcttctaggtcatggtagaccctggaaatcctttgctttcaccagcctgcccagcggccctctgtgtgggaggacttttcattggtttcactgaagccctccacaggagagatttcaagtgtcttccttggtgctgtgatgagtatctgcttgcacaggtcgtcccacccatgcagtgttaggttgcaggaagcgtgtgtttgtagctctagctgttgttgcttcgctttgctctctagcgtctcagtggtaatgtgtcactgataacctggctctgtcgagaatgtctgtttcgcctgatagaaaagcaggcaaggcagggccgcaggaggcctggggtggctcccggatggaacaggtctagagcagctgcttcttacctcacggttgtctgtcacatcactcgggacggcccgtctctgccggtctctctaacacagggttccttccctggtccagctgtttgcttccttctgcctttctcatgtctgttgacagatgcatgcctttgagttctctttcttgtgagtgtctgcacacagacgacaggtctcacgtctagactctgtgcgtctgagcgtgaagtcaggaagtggatctgacacactttgtacttctggtggtgacatttttttccctttttaaatccacatactaaaaatgatgccaaacaatattaaaaaagacttgcactcccgaagcccaccatgggaacacagctgcccgttcctgggttgcttccgattcttttagtcacattttgacaagtgcagatgatacacacactctttttttgttgttgttgttgttttccaaacagggtttctctgtatagccctggctgtcctggaactcactttgtagaccaggctggcctcgaactcagaaatcggcctacctctgcttcctgagtgctgggattaaaggtgtgcgccaccacgcccaacttgatgcacacactcttgtgctcacagtttttgcttgtatatttcctcctttttggctcacagtttttctgtgcactgtattactggaaccttctatctgacaagcagtgctttgtggctgacgtgactggacaatgggtgacctccagcctttaacacaaacaatatgcacacttttgcctgaactcctatagtaaatttcttataataaatgtcctaagcagtttactggagcagatgatgcagacacgtattttaatgttcctgggacattggatagaatcacattccaagagaaccggaccagtctgtagtttctcctctgtgtggctcacgggttcctgctcagctggtctcggtgctggcttgtactggttcactgtcagctcactggctcgaaatggcacctttccttttcatcctagttaagaactatacatctctgctctcagatttgagcccttttccttagctgggtgaatggtcacttcctggtcacagtttcaggtgtccgggaaagaatgtggttttcgtggtgctcagagcatgagtgaggccaaggaggtgcagcctgtccgtcccaggccggatggatacccagggtcaggaaatacctgcccggctgcatggcactgctggtttgtggtgcagccaggtgcttggatggcccctcgtggcctggtcagagcagtgttcaggttctattgagatggccttctccgaattttccctcaaagcttccatgagagggactcccaacctggggtgcagacagtgctgtctcttcttaagctggggcatgtccccttctccttaagaggccctggaggtgaagccattatttttcccccggggaagctgtcccagaatccagagtcagaggttggtaaactatagcctgctgtctgtttttatgtggctcacaaactaaaaatgggcctacatctcaaattatgaaaaagatggtcttttataatgtgaaagttgtatgaaattcaaatttcagtgtcagaaacatgagttactgctgaggagacatgctcatctgcttagactctggttatacccatgctgcagccgcagagactgtgcggctcctgaaagggtgaaatatgtgctattcggccatttactttgctgacccctgacctggtcttagagtccctgaggaaagggtggagggagttgttgcctcaatcctgggctgccccagtcagatggaagctgcaggcaagggctttggggcaccatgccaagtcccctttgggcgctgtctcctcccctcccccaccccccaggcagaagcctcctgatgccctttgaagaccacggagacctggagcccctggagctggtgtgggccaagtgccgaggctacccctcctaccctgccttggtgagtctgccccagacgacaccctcctgttccctctccccctggcggctctggcccctgccttgccttgggggagtatctgattggatgaatgtggtgggagtcagctgcagagggagggccatctttaccctagcttttctggggcaccagcaacccacccctctccacacacaaaaggctctagttgttcagagacacccagtgcttagggcttctgtagcattgctcacttgcttctgagtaggaggaacactgttagtgaggttagcacgctgataatgcttagtggcactattaaacatctgccctactaagtccttgaaatgccagcgatagaattgttgatcttgttttgtcgggacgaggcagggtctgttagctactgccagtaagcactggggttggaatttgatttcagggctcataatatgatggaaagaaagcctttgttttgagccactgcattaggagtcttccccagtcctggcctctcaggactgcagtcggcccctttccccatgcatatgcctgcgcgtacgaggcagaacgcctttagccttttccctacccagcattccatgaacatgcccatcttacatgatgaaaacctgtcatcacgtccttgttactgatgacatcatcatgtccttgttactgatgacatcatctggcccttgttaatgatggcatcgtctttcagttgctctcatgtaccacgctttgaccatttcccagctccccgggtagctttcctctttctctgaggtcagcagctgtgagcgaacatcttagctttaccttggtgcacgatcgtgattatttctcaggcacgcccactaggggcaacatctgtgcaggattctggcacaagttgccaagttgcctggaagttagttctggtttacactcccactggtagtggctaataattctatctacctcctcggcttctgtctttgtcttagtcagggtttcattgctgtgaagagacaccatgaccacggcagctcttataaagtcaaacatttaattgggcctggcacacagttttagaggtttagtccgttatcatcatggcaggaagcatggcagcatccaggcagacctggtgctagagcagccaagaatcctacatcttgatctgaaggcagcggaagaagcctgtgattccacactgggcaaagcttgagcataagagacctcaaagtcccctttcatagtgacatacttcctccaaggccacctactccaataacaccataccctctaatagtgccactccctgtggccaagcattgaaatacacgactccccaggggcttttcctattcaaaccaccactgcctgctaaagctttcccgggtggggaggaactgaccacaggctctgcaagataataccaccaactggaaacctttggatcttgtgagactcatctggggagattttaaaagatgtgtaaagtcagctccaccctggaacaccaaagaagccttctagaggctgagtccaggcatcagggttttctctggttatttctcagggtctgtagcactaggggaggctatttaagacctctcctgcacagctctgggcttttcccagccctgcctctctgtgactcttgaacctgacagcagccttcaaagataaggaagacaggctcctgtttgtgatgacgaggaagccctgttgcagtgagattgtaccacttcttggagccacattggttcctatagcttactttgtcccctcctgggctatggcaggtgtggaaaaggcacacttacctggaagctggagacactgaactgggagctctgtacagatgagaccacgggccaggtgtggtggcgcatgcctttaatcccagcagcactcgggaggcagaggcaggcggatttctgagtttgaggccagcctggtctacaaagtgatttccaggacagccagggctacacagagaaaccctttctcgaaaaactgaaaaaaaaaaagaaaaaaatgagaccacagacccagtttattcattaaggaagtgatggtgctggctggtttggagcattgcatttggggttgggggttttgtgttttaattgttttcaaaactacaatgaaagagagacagtccaaaactaacctttaaaatacaaacatacaaaacactgagacctggtggtatacaccatttatctcagcataggcaggtggatctcactgagttcgaggccaatgaggtctatatagttccaggacagctagggctacatagtgagaccctgtctcagaccaaacaggacaaaagactgcagagaagaaattcagtcaccacttgaacacaacttgtgcgtttcttctgctgcatggcctgcatccctgttcccatgcatgtccactgtgcatgttgtaccgggaggtggtgcgagttttattttgcttctgcaaaagtaatgtgcacattacaggagatttggaaaaacagaaaggggggcggagcagaatgcccacgcctttgaagcacatggagtagtattcgtactgttccctttcgtgttcactgttgcagtcatggtgtctgtgtgcacgtttgctgcatgttgtgttgggccttaccacgagcttcatatccatgctctgtaaaccggcatcatgctcattgggtggacgggccatgtcctcagggccctcatcctccaggtcttcccagtctcttcctgatagccggcaagtgctggtggaggcagcagagcagtgccaccaccctcccaccccccacccccaccttcgggagctggggagacttagggctattgtatcttcagctttagccccaggaagagtggcaggcagcttgggagacagtttcaactactacatagctcatgggtgggccggaagtcgtctttcttagcaccttttaagaaatttgtttaagccgggtgtggtggcgcacgcctttaatcccagcactggggaggcagaggcaggcgaatttctgagttcgaggccagcctggtctacaaagtgagttccaggacagcagggatatacagagaaaccctgtctcgaaaaaccaaaaagaaaaaaaagaaatttgcttagatttatttatttaatatgtatgtatatgcgtattttgcttatatatacgtttgtttgtgtaccacacgcatgtctggggccagggtgggggtgtcagaaagtgtctgtcactttgaaatcgagttgcagaaggatgtgagccaccctgtgggtactaggagctgaacttgggttctttgctgagcctcctctcagtaccttagagtagccgctcagcacagcaactctcagtggcttactttggaaggacatggggtgctgccagggaaatgggcagtttctcatgagcagagagctctggggtgggacggacgtggaggttagattgctctgtctctagagaaggctcttcctcagtcactttccaagactctctggcctttgtacacagaggtcgttgagccagctgggctgggtcggaggctgcatgcaactcaggcgtaaagccagaggctccagagcagctggtctccgtcctctgccgcagtttccctgtctgctaacacctgtcaggtgctgccggcctcagcaggagattgaagcgagatggtgtgtagatagtcaaggacattgggaacagaaagtgctgcacagacctggagagctactgggctgttgatgacaagcctgctcagaatgagatggggcctggccttctggagattagttcctctggtggctttggtttttcccctcaaactccaatcctttcagctgtctttctgcctcctctccaattttaccagaggtatctggccccactcgccttgggaaggtggcaggtagccaaagcctgttgcacagaagtaaaggtgttgcctctgctgcctggctgagctttctctgtggtccagcctaggtgcccagttgagcaaggccctgagtcctgtagtggattacagaggtggtgaaagcatgcccagggaagcagccctagtcctttctagcagacattgtaagagagctggcttctctggcttccacgtccggaccgcctgctcagcctgaccaccaggtccttccgtctgaaggattgattgcacaaggctgggaggggtagcacagtggagtgggggaacaaagttaagatttcaattttagggtgggtgctggtgattgatccatgccagcctctccaccactgatcatgtggagaacggaacccttgtgtgctgaggccaatgtcttggtggtgggctctcccaccttcccctgcttagggcatgtctcctcttctgcctccagatcatcgatcccaagatgccccgggagggcctcctgcacaacggtgtccccatccctgtccctccactggacgtgctgaagctgggcgagcagaagcaggcagaggctggagagaggctctttcttgtcctcttctttgacaacaagaggacctggtgagtgacagctgctgtaggagcctggccaaggtgcagggtcagcccacgggaggtgggagggcttctgcttgtggctgcccctaaagacactagaggaaggtggagtgggcctccttagggggcttttcaggagactttgctcagaaagctacaggatgagggctacagcctgggcccagggagaagtcaagcacagcacactttgagtgtgggcctcagtgttcctctgtagagctcaggaggccttaggaattgtggatctctgtacccttaagccgtcagtcactaaatgtcacctgatcctggggatggacatgaccttgggtgggcagctccgtagctagttactggagggagatccagaggcagaggggagtctggacagtgtggtgtcctttatgaaggcttggaggcctgtgcctagtaaagtgttgtcccgaatctctgtagaaaggaggtagagtggctggtaatggagctgtccgactttgcactcctctactccccttgagcttgcctgacctggagctgggtccagaggcccccgtagggccttctgcagctgcacctcagctctgcttgcattctaggcagtggcttccaagggacaaagtcctgcccctgggtgtggaggacactgtggacaagctcaagatgctagaaggccgcaagaccagcatccggaagtcagtacaagtggcctatgaccgcgccatgatccacctgagccgagtgcgtggctcccatgcctttgtcacttccagctacctgtgagagccgagctgggcctgtgtctgccttctttgcctctcctctgtccctgaggcatgagaacctctgctgcccctgccacgtgtatggccggcagcttctttctaatggcaggccctgactggactgggtctccgagggcaagacccaatattgaccaatcatgtggttcccctggagggctgctgtgtgccaaaaaactcccacccgaggtccctggggatattccactgaagaaccacttagaagtagaaacagctgagagtcttagccagccagggagatagacctggcccacaaggcaagagggcctaggctgcttttctggggccagccggctctctccatgtctctcccacctaaccatacctcagggcaggcaaggttctgacattgatcccagagatgtgccagggtccctcgggaaccctcagagcttcccttcccccacaccgcccgtgcttgcacccccctgtctcatctcccacacccaacccaggttctcccttccctcattgctctctgctctcccttgtgccaaactgacagcaacatcaccaaattgatctttttctttgatgtcccatttccttcctggccagctgctacattagatggatgtctgccaggcgcttgagtcccaggtagaagctaccccacctgtaaggaccctcccccactcacagccctccagcaggcatgctgctgccctcccctcctgcagcagccataagcctcactgcatcagcatgatcaccgcggcacgggcggcgggtggcgggtggcgggtggcgggtggcgtgcggcatggcactgccctccagcacccgccctctgggattgctgcccctgcctcccagaacagggctcttttctttcatctcctgccttcaacctcttctccaccatcacctcctcaatccctaccctcaaaaaggaaggaaaaccaaactgtgaatgaggaaagctgactgacaagccaacgcagctctcagaggcttctgctcttgacatttcttttcacttctttaagcaccaaagccgcaggcgggtttgcagaccgccaattgccatgttgacttctaccttgatgttatttttaattgttttcaattttttcataggggagttttgggcaaaaaacgaagtccctggggagatcactgccatttttacatactcaaactttttaaagaaatacaaccaaccaaccaccaacttcttacacttttgggactcgagccagagtttaaaagggaaccaacaaaactcaccaagagggccaggttctgtccagcaaacagcacagccacgcgggacagggcgtggtgtacataactgtaagatagcaggcacacactctccattaccggaaccctcccttgtgcatccatgctgcacagcctaatcaaggagccgacacgtccccctatccccaggtagctggtcagctgtggactctgtgacccttgtctaaacctgtgtcaagatcttggggcttctccctttctgtctccttcccccaacactatctcctctgtctctatttttcagtctcggaatccttccctctctccgagtcccactttaaaaactgctcttttaggacaggatgcggctcggatctgctgtggcacagggcctcttctctgtctggtctgctgtgaagcacatgatgctctatttattgtagaaagtgactttatttgccttctagaattgtttataacagatggttataagagaggtaataaacagaaaaacctatgcctgtaaagaatacaagagttaattttacctaccataatatgatgtcttattttctctccgagaaataaatgttctatgggctgtggtgtgcggtgctgtttgctgtccgtgacggggcctcctgtcctaacaccacccgcttctctgaaggcagaaccattaagaacggacctgtctgtcctttagatctcatggatggcctgaggagggtcctgccaggttgccgcaggttgcagagaagtcattgttcaagtcactgtgtgctgtatgaggccgctagaggctgatggtgggtgctctccttacagaagcagagctcactgatggagctcctgtctggccagccagccatcttctcttcccgtgctgaggttacagctgcctgtcaccaggcaggtttattttttgttgttttgtttttagaccatccctttagaagatctgaactcaactcttgtcatgtttacatgacaagtattttgccagctgaacccagaaaggggtaccttatttgttcattcattcattcattcattttaatttattttacatttcaaatcccagtcaccccctcccggaaacccccattccatcctccctccccctgcttctatgagggtgttcctccacccacccacccactcccaccttcccacccttgattcccctacactggagcatctgtccagccttcattggatcaaagacctcttctcccaatgatgcctgacaaggccatcctctgctatatatgcacctggagccatgtgtactcagttggtggcttagtccctgggagctctggggggtctggttggttgatactgttgttcttcctgtggtgttacaaaccctttcagaaaggggcatcttgaagcatagactcaagaggcattctcaggaatagcatgtctgtgcaaagagcctgtgggagtttgctactgtcctccctactcaggccctctgatatggtagaaggcacagctcttggttaccttcacagggcctaattcatataacataataaagtgcgtccagcatgcagacaacccttgtgctgcataaacagtgcagacaccttggcatgtaagacattgctgacgcctgaggccattgtgaggggcctggcctggagaaaggtttggaaagaagatatgtttggccgggcaacagctaaaggtttcaaaagaaggaagcagttaatttaagccttgaaaacaggtttagaaatccataattatgagctgggcagttcttgcgcacgctcgactggccaggaagaacgacgctgcaacaggatccttctgcacatgtttattgggagagcttgattgtagaggcggaaaaacctggagcccagaactggtgctgcttttataggcctaggaggggcgtgtctcacactcggattggttatgcactaagcctcatttgcatgttcctcatctgattggctactctcagtaccttacagaacctcattatcatacctcatttgcatgtctcacatctgattggttatactctcagtaccttacagaacctcattatcatgcctgggccaggcagtgtctttgcaaaaaactttactgcacatgtacacattggttgtttgtccaatcttatgcgtggtggccagcagtagtcagtgccactcagcaacggcacatgtggcttcccacaggcagtggtggtgcacacctttaatcccagcagaagcaggtagattgcagatttcaagaccagcctggtctacagagtgagttccaggacagggagggctacacagtgaaaccctgtcttgaaaaaaaaccaaaaacacaagcagtctttatttatgggttgtattttgaggtacagaggtgactgtaaaatgcggaaggcatgttcattacttcgtctcctccccctggctgacctcaaattcaccacacagaccaggctggctttgaactcagggactgttgtgtctttgtctcctgagtgctgagattaaaggtgtgtgccatcccatccagattttttttttcccttacactagtgaatccagtttgtgttggccacctccccctgggcatggggcccgccctggagtggggtcatacaggatatgccactccactgaggaaaactgacatcccctcccccagtggcaacaaatgccagtagaccctcagctaggctgggacttcacactctcttcccctccttcatgctgagatttttgcctggctggagtttgtgtgggtcttgtgcatgcttccacggtccctgagctcacgtgtgtaccccctttactgcacaagtctgaaaaatggtgcttctttgaagttatctaccgcctctgcttttcccactccctcttctgcgtagatcctgagccccaaggaggatgctgatatccacatcccatccaaagctaccattctaatgtcctgagttctctgaatattagccagcgcgtgtctacatgttaatagccttcaactgcaaaaagaaggttctgtggcgagagtcaagcaacagtgccccaccccccacccccggcccacaatctatctctccatggcttcctggactcactgaactattagtaattaagtcccaggaatggattccctcttgtggagccagtttcaacccaatttttaaatgcaattggttcctctcctaacaaccatcctggtcattcttgtcccagtgggcatatcttgccagcaggttgttgtcgctcacagggttgtcagcagggtgacattggtgaccactttcttctgggggtatgcacagcaccttactgctggcctgtgggtcaagtactagagggtaacggagagcactggcaataccctttaatgtttttgtttttgtgttttttttttctggggagggtatatggggcaccactggctaacaatctacaaagaggtaacccatttctggtttggggtttcatttggtagcacagggcaacatagtattctcttttcccttccttgaaagatggcatccttcctcatgaccaccaccttgctacctcacttctgtggatatttattctttcctttttaagtttttcatgacatggtgtagtgtgtgtgtgtgtgtgtgtgtctagtcctggctgtcatggaactttctccatagaccaggctgacttcaaactcagagatccacctgcctctgccccctgagtatgggagtgcaccacacgcaccttccatggactttctgaatgaagcacaccaattttaaatttttaaattcaattaaaagcaattaaaagaatctaaaagcaatgtccagggcctggagcaatgaatggtccagggggttaagagcacttgaaactcttgggttcagttcccagcacccacagagcagctcattgtcataaccgctaattctgttccaggggatctgagtacacacacagattaatccagcccaaagatttatttattattatatgtacatatactgtagctgtctttagacacaccagaagatctcattacagatggttgtgagccaccatgtggttgctggggtttgaactcaggacctttggaagaacagtcagtgctcttaactgctgagccatctctccagcccctaaaacaactttcatatatgagagaaaatgtgcattgtggatctagtttgccctcttctggcctccaagggcactacactcacatgcatatacccaccttcatatacataatcacacataataaacatatctttttaaaatgcatgtaggagccgggcagtggtctacactctgtagaccaggctggcctcaaactcagaaatccacctgcctctgcctcccgagtgctgggattaaaggcatgcgccaccacgcccggcacatgatcactactttagaaaatgccccacagctggatctcatggaggcacttccccaactgaagctcctttctctgtgataactccagcctgggtcaagttgacacacaaaaccaggcagtacaaatgacttcccttctagcctactgcccaccagaggtagtgggaaaaaaaggctatgaggatacaggggaagtggacctgtttagaaatggttccttggagcaaatccagtgtgcattgtcaggatatcagcagttcagctcacacgaatcagcaatggcagctcgattctgaagaagccatgggggtcagctgtttgctgtttagaagtagttccttggagcgatttcaatctccagttgtcaggatatcagcagtccagttcagtagtgtcaggatagcaaacaggaatcagcagtggtagtactacccagcagaaacaaccaggcccagccgggcatggtggtgcatgcctttaatcccagcactcgggaggcagaggcaggtggatttctgaattcaaggccagcctggtctacaaagtgagttccaggacagccaaggatacacagagaaaccctgtctcgaaagacaaaaaaaaaaaaaaaaagaaagaaacaaccaggcctccaccaccggcataagtcagcaggagcaacagaaccagtagggacaccaggagaagttctctgcagtgcatctcaacaaagtgaatgaagatcagcgaagacaagacacacgagatcaaagctagctatgaaagccccgccgtcactgctcatctggcccctattatactcctcttcccacaggtcttgactcagacgtgagtctgtatcagctgacatatccagaaacttccactttgcttggccaattggctgagtggcagaacaccatcagaagtttttgttgtttctttctgtgaattcatgacaaatgacgaccagtaagaaatggccaggtaccaataccatccagcattttctatcatctgttgggttatatttatattccttcttaacatcacgcatcctttcacgtgtttgctttaacaaaacatcttttcctctgtgtctgcttcaggaaaacattctttcacgtgtctcctttagcaagacatcctttcacctgtgtgcctcagcaaaacatttgacatcactgactttccaaagaaaccagaactttctacttcacctcagcctcctggctcttcctggcttgtattggtagatggtactaagccagactgcctattgctattgtgttaaaatattagtagtctctacagtactaatatatccacctccagcaactaggctgtggggtacctttttcacggacaccggctgtattctttactttcctgttgctgtgagaaaatgctctgacagaagtaacttgaaggagaaatgttttattttgtctcacagtcctggagggacaaagtccatcctgataagagggcatggcagcaggaacaggaagctgaacttaccatatccacagtcaggaggccgagagcagagaccaggaaacaatgctggtctataaagctttcctccagcgagactccacctcctaaagatcctgttgcatcaactgactatatgaccactctatggtacaattattgggaaggttttattgtaaatacaagagaatggccagaggcgcctggaagggtctattgcagagacagcagtaggctgagcatggcaagtgtactggacctggccatgagaaacagcagcaaagcagagagaggaacagagagagagtgcacagcgggcagggagtataattgagtagggtaataaagagaactggcagctgtagggagggaagccagtgagctggaggataggaggggccaggactccggaaagtgtagcaggtccttgtaatgccgagggagtatggaggtcagtgtgtgctttgggatgctaacagacaccacagatagcctttgtcccttctgccttttagaatttgaggaccaaaggtttcctagcatgtctcatgagtcagtgggggacaattcaccttctgactaaaacatgggccatagaccagattcttttccatgtgcaaatatctagaaatgagtagtcaacaaatggccatataactcttttgctagtttggaaagttcctgtctctgctttggggcagaactgccagcatcagagagagaggtcacccctaggtagacacatcacctctgaggataagtttggaaggaaggtggttagagaagcgaacttatcgctaagctttgaataggatttttttttttagatttatttactttatatgtaagtgtactggctaattttgtgtcaacttgacaccgctggagttatcacagagaaaggaacatcagttgaggaaatgcctccatgagatccaactgtaaggcatgttctcaattagtgatcaagggggaaaggccccttgtgggtgggaccatctctgggctggtagtcttggttctataagagagcaggctgagcaagccagaggaagcaagccagtaaagaacatccctccatggcctctgcatcagctcctgcttcctgacctgcttgagttcctgtcctgacttccttggtgataaacagcaatgtggaagtgtaagccaaccctttcctccccatcttgcttcttggccatgatgtttgtgtaggaatagaaaccctgactaagacagtaagatcttactatggatggttgtgatttgaactcaggacctttggaagagcagtcggggcttttaaccactgagcaatctctccagccccctccaggattgttttagacacagctttacaaacagtagctcagatatagctgcacctagtctccatgaattttattagtggctccagccacgaacaccccacccaggccactctgtggccttcccttcctgtccctctctgcttcacagggagtgcactttggtgaacttctcctgcaaggaatcatgtgccatgcgctcttccatgtctagcttctctttcagctgtttttgattctgtcctgtggctcatatagccctttgctttgtcagggctgaatggagtttcattatataaacactgtacgtttgtccattctgccgagggtgtgtgtgtgtgagtgtgcgtgagcatggatgtgtgagtgtgtgtgagtgtgtgagcatgtgtgtgtatgtgtgtgagcatgtgtgagtgtgtgtgagtgagagtgcgtgtgtgagcatgtgtgtgagcatgtgtgagtgtgtgtgtgtgtgtgtgtgttgcacttagagtttgggcattggaaatagctactaggaatgcttttgcttttatatctctctctcttatatgtttatttttatttttatttctaagcatagtctcattgtacggccagtggctgcctgagatctgctgtctctgcctcagagtcacggtctgacagtcatagactagagtgtgtactgccacagctgtcattacacatgtcatttgcctgccactaatacctatttccctttggtgtggttacaggagtgacctgctccatcatggggcagatgcagtttagtagattctgccatcgctgatgtgtgtgtatgtgtttttgtgaaagagagtgtgtatggtgtatgtgtgtgagtggtgtgtagtgtgtgtgtatgtgtgtgagagcgtgcatgtgtggtgtctgggtatgtgtggtgtgtgtatgtgagagagtgtgcctgtatggtatgtgtatgtgtgtgagtgagagagtgtgtgtatgtaagaaagtgtgtctatgtggaatatgtgtgtgtatggtatatgagattgtgtgcagggtgtgtgtgtatgtgtgtgagagtgcatgtgtggtgtgtgagagagtgtgtgtgtgtgggatggtatataagagtgtattgtgtggggtgtgtgtatgtatatgggtatatgtgtatgtatgcgagagggtatgtgtgtggtgtgatgtgtgtgaaagagagtgcatgtgtggtatcagtgtgtgaggtgtgtgcgcatgtgtggtatgtgtggtatgtgtatgtgtgtgtgtttggtgtgtgtatgtgtgagagacagtgtatgtggtatgggtgtgggttcatgtgtggtgtgtgcaaatgtgtgtgtgtatatatgtgtgtgagagagtgtaaggtgtgtgagtgagtgcgtgggggtgtttttgcaggcatgtgagtgcactacaggattgaggaggtcagaggccttgtgaagtcagttcattccttctacccttccctgggttccagggacgcttccatagcaagtacttttacccacagaatcatcaccagaccacactttatgcttttacgtcccaaggccagtaactctgggtcagagcaggtctctttggctgt

SEQ ID NO: 189 - DNA, 3500 bp, Mus musculus
atgaggaagcctcgccgaaagtcacggcagaatgccgagggccggagatccccatccccatacagtcttaagtgctcacccacacgggagaccctgacttacgcccaagcccagaggattgttgaggtcgacatcgatggccgcctacatcggatcagcatttatgacccacttaagatcatcactgaagatgagctgactgctcaggatattaccgaatgcaatagcaacaaggaaaacagtgagcagccccaattccctgccaagtccaagaaaccctcatcaaagggcaagaggaaggagtcctgttccaagcatgcgtccggtacctccttccacctcccccagcccagctttcgtgtggtggatacggggagccagccagaagcgcccccattgcctgctgcttactaccgatacattgagaagcctccggaagacctggatgcggaggtagagtacgacatggacgaggaggacattgcctggctagacatggtcaacgagaagcgccgagcagacggccacagctcggtgtcggcagacaccttcgagctgctggtggaccggcttgagaaggaatcctacctggagagccgcagcagtggggcccagcagtccctaatcgacgaagacgccttctgttgcgtgtgcctggacgatgagtgccacaatagcaatgtcatcctgttctgcgacatctgcaacttagctgtgcaccaggagtgctacggcgttccctatatcccagagggccagtggctatgtcgctgctgcctgcagtctccctctcgtcccgtggattgcgtcctgtgccccaataaaggtggggccttcaaacagaccagtgatggccactgggcccacgtagtctgcgccatctggatccctgaggtctgcttcgctaataccgtgttcctggagcctattgagggcatcgacaacattccacccgcccgctggaagctaacctgctatatctgcaagcagaaagggctgggcgcggccattcagtgccataaagtgaactgctacaccgctttccacgtgacatgcgcgcagcgggctgggctcttcatgaagattgaacccatgagagaaaccagcctcaacggcaccacctttactgttcgcaagactgcgtattgtggggtgggcagccccctcaagggcgtgtccaagaagggtaagatgagtttgaagcagaagatcaagaaggagccagaggaagctggccgagaggcaccctccatcactctccccatggtcactgtcccacagataccctcttacaggttgaacaagatctgtagtggtctctcctttcagaggaagacccagttcatgcagcggcttcacaactactggctgctgaagcggcaggctcggaacggtgtccccctcatcaggcgcctgcactcccacttacagtcccagagaaatgctgagcagcgggagcaggacgagaagactagtgcagtgaaggaggagctcaaatactggcagaaacttcgccatgacctggagcgagcgcggctgctgatcgagctcatccgcaaaagggagaagctcaagcgggagcaggtcaaagtacagcaggctgccatggagctggagctgatgccgtttacggtcctgttgaggacgactctggacctgctgcaggagaaagactctgcacacatctttgctgaacctgttccagattacctggaattcatatccaagccaatggatttttctactatgaggcggaagctggaatctcacctgtaccacaccttggaggagtttgaggaggactttaaccttatagttaccaactgcatgaagtataatgctaaagacacaattttccaccgagcagctgtccgcctccgggacctgggaggggccatcctgcggcacgcccggcggcaggcagagaacatcggctatgatcctgagaggggcacccacttgcccgaatcacccagattggaagacttttaccgattctcctgggaggatgtggacaacatccttatcccagagaaccgggcccatctgtccccagaggcacagctgaaggaactgctggagaaactggatctggtgagcaccatgcggtccagcggggcccgcacccgtcgtgtccgcatgctgcgcagggagatcaatgcccttcggcaaaagctagcacagccaccgccaccacagctcctgtcactgaacaagactgtgcccaacggggagctgccagcaggatctcggggggatacagctgtcctggagcaggctcagcaggaggagccagaagaggaaggggacagagatgattcaaaattgcctgccccaccaaccctggagcctaccgggcctgcgccttccttgtcagaacaggaatcccctccagatcccccaaccctgaaacccatcagcgacagcaaaccttcaagccggttcctaaagtcccggaaggtggaagatgaggagctcttagaaaaatcagccctgcaactggggagcgagcccttgcaatgcttgcttagtgacaatggcattgacagactgtccctcacaaaccccgacagccatcctgacacccctctcggcaccgtgggccgccgaacctccgtcctcttcaagaaggccaagaatggagttaagctacagaggggtcccgatgggacccttgagaatggcgaggaccatggcccagaggacgatcctgcttctccagccagcacagaggatgaacactattcccggaagcggccaaggagccggagctgtagtgacagtgaaggggagaggtcccctcagcaggaggaagagacaggcgtgactaacggctttggaaaacacacggaaagcgggtctgactcggaatgtagtttgggtctcagtggaggactggcgtttgaagctggcagtggcctgacgcctcccaaacgcagccgtgggaagccagccctgtctcgtgtgcccttcctggaaggtgtgaatggagactctgaccacagtggctcaggcagaagcctcctgatgccctttgaagaccacggagacctggagcccctggagctggtgtgggccaagtgccgaggctacccctcctaccctgccttgatcatcgatcccaagatgccccgggagggcctcctgcacaacggtgtccccatccctgtccctccactggacgtgctgaagctgggcgagcagaagcaggcagaggctggagagaggctctttcttgtcctcttctttgacaacaagaggacctggcagtggcttccaagggacaaagtcctgcccctgggtgtggaggacactgtggacaagctcaagatgctagaaggccgcaagaccagcatccggaagtcagtacaagtggcctatgaccgcgccatgatccacctgagccgagtgcgtggctcccatgcctttgtcacttccagctacctgtgagagccgagctgggcctgtgtctgccttctttgcctctcctctgtccctga

SEQ ID NO: 190 - protein, 1147 aa, Mus musculus
MRKPRRKSRQNAEGRRSPSPYSLKCSPTRETLTYAQAQRIVEVDIDGRLHRISIYDPLKIITEDELTAQDITECNSNKENSEQPQFPAKSKKPSSKGKRKESCSKHASGTSFHLPQPSFRVVDTGSQPEAPPLPAAYYRYIEKPPEDLDAEVEYDMDEEDIAWLDMVNEKRRADGHSSVSADTFELLVDRLEKESYLESRSSGAQQSLIDEDAFCCVCLDDECHNSNVILFCDICNLAVHQECYGVPYIPEGQWLCRCCLQSPSRPVDCVLCPNKGGAFKQTSDGHWAHVVCAIWIPEVCFANTVFLEPIEGIDNIPPARWKLTCYICKQKGLGAAIQCHKVNCYTAFHVTCAQRAGLFMKIEPMRETSLNGTTFTVRKTAYCGVGSPLKGVSKKGKMSLKQKIKKEPEEAGREAPSITLPMVTVPQIPSYRLNKICSGLSFQRKTQFMQRLHNYWLLKRQARNGVPLIRRLHSHLQSQRNAEQREQDEKTSAVKEELKYWQKLRHDLERARLLIELIRKREKLKREQVKVQQAAMELELMPFTVLLRTTLDLLQEKDSAHIFAEPVPDYLEFISKPMDFSTMRRKLESHLYHTLEEFEEDFNLIVTNCMKYNAKDTIFHRAAVRLRDLGGAILRHARRQAENIGYDPERGTHLPESPRLEDFYRFSWEDVDNILIPENRAHLSPEAQLKELLEKLDLVSTMRSSGARTRRVRMLRREINALRQKLAQPPPPQLLSLNKTVPNGELPAGSRGDTAVLEQAQQEEPEEEGDRDDSKLPAPPTLEPTGPAPSLSEQESPPDPPTLKPISDSKPSSRFLKSRKVEDEELLEKSALQLGSEPLQCLLSDNGIDRLSLTNPDSHPDTPLGTVGRRTSVLFKKAKNGVKLQRGPDGTLENGEDHGPEDDPDASTEDEHYSRKRPRSRSCSDSEGERSPQQEEETGVTNGFGKHTESGSDSECSLGLSGGLAFEAGSGLTPPKRSRGKPALSRVPFLEGVNGDSDHSGSGRSLLMPFEDHGDLEPLELVWAKCRGYPSYPALIIDPKMPREGLLHNGVPIPVPPLDVLKLGEQKQAEAGERLFLVLFFDNKRTWQWLPRDKVLPLGVEDTVDKLKMLEGRKTSIRKSVQVAYDRAMIHLSRVRGSHAFVTSSYL

SEQ ID NO: 191 - DNA, 56018 bp, Homo sapiens
aaacttcctctcatatggtcaaatgtatgtgttaatctatccattccaattgtttctggagtcctttgtcttcctactccaatggtttcacttgagacctgccacacaattctcttccttgaatttcccttcattgtaatcctggggatatcttttgcttcttttttacatttaatcctgtattagtccattctcacattgctataaagaaatatctgaaactggtttatatatatatataatatattaaatatataatatatataaaaatatatattatataaaatatattatataaaataaatatataatatattatataatatattatatatataatatataatatatattaaataatatattatatatataatatataatatatattaaataatatattatatatataatatataatatatattaaataatatattatatatataatatataatatatgttaaatatataatatatattaaatagatatatgaggtttaattggctcacagttctgcaggctatatacaggaaacatggtggcatctgcttctggggaggcctcaggaaacttacaatcatggaggaaggcaaaggggaagcccacactatacatggctggagcaggaagaagggtgggagcaggtgccacacatttttaaacaaccagatctcatgagaacgcattattgtgatgatagtaccaaggggaagcagaaaatctgcccccatgatccaatcacctcccacccaggccccacctccaacactggagattacaatttgacatgagatttcggcagggactcagctccaaagccatttcctggatcccatgtattttacttttcttggtttttttttctacctcattttttgtgaaaaatgtcatgcagttatttcctgaggaagtatagataaatgttgtgaaatcttgaatgtttgaaaatgtctatactattttcacacttgatattttggctgggcatagacttttccattggaaacattgttcctcagcatttgaaagagttttttcattgccttatagctgcttgataacattctgattcctagttctttgtatctgacctgcttttcctttccaaaaactttttggattctctctttttctatcactagtgttcttggtttagatcttttcgcatttattgtaccagagcactgaaggagactttcattctggaaactcactaccttcatttctggggaaaattctcatctctttctagaactactgtaaatgggatgttgagcttcttaaattcatcctcaaattctcttttttattctcttttctgtcctattttccatctccttttctctctgggagagttgttaaacctcaccttctaactcttccattacagtctttaaaattttttcacatttttaatattcaagatttgctcttttctgactccttcttttctgtcctttcttcctcctttccttcctccttccctttctctctctctctcccctccccttgctatctttatttctttgagacaaggtctctgtcacccaggccagagtgcagtggtgcgatcttggctcactgcagcctcaacctcctgggctcaagcaatcctcccgcttcagcctcccaactagctgggatcacaggcacatgccagcacatctggctaatttttttttttgttagtagagacagagtttctctatgttgtccatgctgatcttgaactcctgggctcaatcgagccactcaccttggcctcccagagtgctgggattacaggtgtaagccacagtgcctggcctccccattttttttttttttttttttgagatggagtcttgctctgttgcccaggctggagtccagtggcactctctctgctcactgcaacctctgcctccctggttcaagcaattctcctaccttaccctcctgagtagttggggttacaggtgcccaccaccacgccgagctaattttttgtatttttagtaggtatgagattttgccattttggccaggctggtctcaaactcctgacctcaggcgatccgcccaccttggtctcccaaagtgctgggattacaggcctgagccaccatgcccagcactttttttttttaaatgaagacagggtattgctatgtcacctaggctggtttgaaactcctggcctcaagcgattctcccactctggcctcccaaagtgctggaattattaggcatgaaccatcaccccagccagctactctttgaggctcttagagatttttgtttgtttgttaagacttctttggttctctatattgttttccccattcttttttcttggattctgaccttcatgatactttcttcatatatctgttggtttttggttgtttattcaatgttaagaggtagttttttttaaagctgtttaaaactctatgtgtgttggggtaggggtggggaatgcttgataccaggtgagcttcagcataaggcaaaaggtgacaagctggatgttttagtgaagatgttccatcgccagtattcataaataggtcttttctccatcttcagagaggaatcatggtattctctaacattctgtaatccattgcttctcaaatcttaatatgcatatgaaacatgtagggagatcttaaaaagcagattctggtttggtaggtctagagtggggcctaaaattccacatgtttaaccaactcccaggagatgtcaatactatcggttcttgaacaataatctaagtagcaaggttctggctgcgggtggtggctcacgtctacgaacccagcacattagaaggccaagttgggagcactgcttgagcacaggagttcaagaccggcctaggcaacaaagtgagaccctgtctcttaaaaaaaattatcgaggcatgatgctgtgtccctgtagtcccagctactcaggaggctgaggtgggaggatcgcttgagcttgggaggttgaggctgcagtgagctgtgatcacaccactgcattccagcctgtgcaacagagcaagacctcatctcaaaaaacaaaaacaaacactagcaaaattctaaaataaacctggcttccagtgttttgcaatgtgattgggggaagaggcaggaccactaagaattttgatctatgaaacatttatttcaactaaaaggatggactgactagaaatgttttcatgaaattttctcttagcccccttctgcaccaccagattccagcaatttgtaccagatttcccctccctcatcagtctagggaagaacatgtgatggtgatgattggggctcgggggagcatcttattatttagtatgcagagattccctttaatttccgttttcagtatgacacttcatcgctgtcttcattggttcctggtggccccaagtctagaacttctttagttcaatttcttgagatagtaaatctcacctgctgttgttttccctcattctctttgttcttgtggatttcattgtcttgtggatttttttatcctttactaacattattgaagttaggggagggagtggggaccaatgcatgttgtcaagccagacattattttaaccatgcaatcattaaacttttccagaaatgtcccactcattgtggactactctttctacaatgtacaatgtaaattgtaaattgaatttaaatttgccatcatttcattgttttctatttgtttcacctttactatatttccttttctttccttgacttcttttaggttggtcgaattttttattctttttttactctgtactagtttgtgagttacatcctcattttttcattcttttaatgttaatgattagtctaaaaattgcaacaggtatgctttatcaacttaattgtggtaaaatttatgtaaaataaaagacagctactctgtacagtttaagttttggcaaatgtatatatacctgtttctccaccactgccatcaacttacagaatgtttctatcactccaaaaagtttcctcatgccctttatagtccctcctccccttcacatccaggaagccaccaatctgctatcattatagagcagtttgcattttccagaatttcatataaatggaaacatgtattttattattataggtattctggagtaatcaaaagctaatattaatcctttaactttacctttttctcagagtattttaatcctggaattctctaaaatcctctaattcactgtttctcaactttaatatgcatataaattacttatggaaatcttgtcaaaatgcaggttctagtttagtatgtgctattatttttgtgtattttctctccctttagtaaaattatgccaagaagatggctacttttagggttggtacttctgctaaaatatggaattatattttatagtgtcctggcttcactcacagttaagagtttaggatttaatagaaatcctaattaaaggttgaaaagataagacattagatcaagttgaacaatttatacttgtcacatactacttgctttcatgcttgcttggtttagcattccactgagtatatggtaaaatgttctagctagaattcaagttcagaagataatgcaagccacactggatagctaatttaaaccataccgtatcacactctcttgcctgactagaacttaaagcatggaactattgaagtcatttccctgttccaaaaatcatcagggtctcctgccccttcatgtctagctccctacccaaccaacagtctccatgctctgactttaccttaccagccttctctctcatatccctcatttttgggtcaatgggtaacccactgtttcctgaaacaatcttatggcattccatgtgttaaagaaaagacagcagaccccaaatggagtcattcatgctgagaggttccatgacaccaaaccaaaacctgtattttactgtaagatctgactcttcaagaaatcaggagagagatgatagtcaaatcccattaaaccaacaagatttcatttacattcctataaagaaaaataatcttgaaaagaccaatctgctatttgctcattgttcctgatttatttcacttctttctgcctataaaactcacctacttgtttagctcataggaactcctttctattttgtagactggatgttgcccagttcataaacagctaataaagccaattggatctttgggactcatttgttgaaattttattctttgatacgttcttcctctttgctcatgcgggtggctcagcctggaccacactccctctaccatctttctagctgacacacctacctgagagctttcaggtagagctcagatagcactttcttcacagagccttccctcttctcctaaacagacgagctcactccctcctccaaactttggcacttcgtttgcatctctcttgaagtgcttatattgtagcacgttccagttataaatacccttgctttatactgtgattagaatctaaatgccttcaagtctgcaagcatactcttttcacctttgtggcctttacagccataaaatagaaccttaccagcagctcacaaatagtaattgaataaatatgtatttcagtgtgaccaaaagaggttccagagaacttgagctgatttcatcatttcttcaatcctcaggttcccacctccaataggagctcccgagcaaccctttgccacctcttaatttgcaatgattgtaccaaactgtgagaacctacaaagtttgaacttagattcttcttcaatcttctcctttgttcttatgtccaatcagacaaaacagttgctttgtcatctgatttctgatttgacctttccttttcctctttctctaacacattttccatcattctgcttaatgcctttttattttcataatgcctaattacctatagtaaactcttccaggtttaccggatctcctgttctactttctccaatacataaagaggataacagtaacattttatagagttagtaagttgataaataagatatggtgtgcatattggacctagtttgtacatgtacctactaccccattgtacaatcttctcctgctcatgtcctctggttttaggagttgatacatgacaagcagcatgtccctctggccacagttattggctcaggatggctgagaaattgcaagatacagtatgctgatgacataattcgagtcctttgactcgatcttgtctatagctagatgcacccctggactttctggttatgagagtttatttcctttattaaactcacttaagttggttttctgctaactgcaacaaagatctttaataaatggagtatataaagcactaagcacagtaccttgtacataagtgttaggtattatttttattatccctgtccccttgccatacctcctacccaattcaatctttttcttatcatctgcccatacataccagctaggataatttccgcattattccctgcatattttccctttgcctggactgtcctgtcaccaacccaatgtcactttacactcttttcaccagttcacatccatcatgatttagaacttggcttaaagaagtctcccattctccaagaagccttctttgaataatggtggctccatactcttcactgccttatctattttttcttgtatgtgttttctacttatttctaccattctggattgcacactactcaaggcaagaaaaaatatattctatctatacttatgatcattagtccctttctaggttgagattttgtcattattttccaaagaacttgtgcagtattagacacactctaagtggtcaatgaatacgttttagaaatacataaatggaattaaatctagagagtgtggtatgttactctatttaagacctgttgttaacctagctaaacttttcccattttccaagcaaactttacattcttaaaccattttaattagtgtaaaagtatcggccgggcgcggtggctcacgcctgtaatcccagcactttgggaggccgaggcgggcggatcacgaggtcaggagatcgagaccatcccggctaaaacggtgaaaccccgtctctactaaaaatacaaaaaattagctgggcgtagtggcgggcgcctgtagtcccagctacttgggaggctgaggcaggagaatggcttgaacccgggaggcggagcttgcagtgagccgagatcccgccactgcactccagcctgggcgacagagcaagactccgtctcaaaaaaaaaaaaaaaaaaaaaaaaagtatcacaatgattccaacctcaaacattcctcccaactgtggtttcagaattcttttagtcaagtatctaaggaaggaatattctattaaaaataatttaacaatcaatcaaggcctatttttttccttatcatccacgttattaatccagtgggtactgcgtctgacccctgagaggtttcttggcctgataaactaatgacaatagtgaagcattaacaaagatatcctgagatgctgaaaaaaagtatgatggggaagtatgaaagaaagaggtggggaaatggtgatttttttttgtattcatgtttcttttagttttaaatggtaaaaccttctcctatcccaaataagttggtttctacttacagctggaaggttcttaaaaacaactatttggaatcaaagatccatgcctctgtttgttgaatttaattgctgtatggtttattggaaaggccaggggtggtgaatttaaaccgtttaaaatagcaaacgattaaagtgaattaaatttagtgcctctgagatttttgatatatgttccaaatttgtttttaataacataattgttccatgttacatttaagattccatcacagggaactggttacgtgtgcagttatgcttgtagaaaccaattccaaatgtcaaaaattaaagtgagggcaactgtaatgatatcattaaaaaagtagaagttgaaaatggaagagaaacacttaggttgaataaggtcttaatatgaaagctttgaatagaaaaacctgaaaaaaatcacatgcattaggttgacttaaggccttttcaacagcatttaaatcgttgacttacaagtagaaaccaatgcattttctcaaggtatttattcattcattttagtggaaaaagatagctcctgatcacgcaaatgggaattgtgctaaataaattttgagaacatccatcaagaaataaaagttactagtcatatgtataaatgattattatatttcatgttttaatagtttctgttagttttcagactttttttttcttaactacaagtactgtaattgcaatattttcttgcctctggggctttctcttccacaattaatcatctttttcttccacaccttccctccaaatgattattccccctagcttcagaacacttgacattaattcatactatttcatcttcacagctttcaaaacattgtcctgcccttgcttagctccacgagccaccccccttgcatttaaaaaattggttaacagaagcatttttgtactatctctttgccagaagatgctatttacttggaaacaaattagcttccttaatcaaacttttgaatttgaaactctctatatttaaattccttagtataacatctatacttccaaagtagcagtatgttcactttaaacattcagaaaatttggatcctaagactttatccttcatccttctgactctagaatacatgtccttgatcatcagaaccaagaaagaaattgagtctcaccagctacaccacaagtgccagcagaggaaacactttcaaactgtcactcaccttcacatttacaggcagcttatccatacgtcctttataaacatcattatgtattggtgcttaagacttcagtcacatgaggtaagctttccagtttacaggcaaaagggggtggcaatggagcccttttctttatttttttgtttttttagatcaaaacaaaagccagtttggtctgatgctgccatttgtcaagcatcttttagaaagccgcctaatgcattaaattaaccaagtcaggtttaaagtgtttcccatgcccacagtgacagacgagttaccaggcatgcttaagcagactgtcaaacttttgtttactccttttaaacggaaagtcagattttttttttttttttttaaaagatgtgtggtgcggaacaagacgctcacctgtacacaacaaaggcaggtctttcccggctgtcctcactgggggaggggatggacaatcgctagacctttgtcctcaggtcctgggcatgggggttaggggagacgcgactttctgggagtcgtgcaggcacctgcagtcaagaaactacatattggttttgacctcaatgactgccctggcttaacctttggagaggccctttagttcggggagggggcttgctgctccaaaccgtagccacgtcacccacaaggactggggaggaaatgactgaccgctcaagagtcagggacccctgtctctcccaactagacccgaacgtccacagccctcttatcgggctcgccccgtggcgggcagggccgtggtgcgcagggatcgcggcgggcgcagacccggtctcttgctcggtgtccccgccgcgcccgcaccgccaccgtgaggccgagccggggatggtgccccgtggcggcggcggcggcgcctccgcgctcctctccgcaccgccccggccgccgccgcgccaggcacgggcggggggatttttttcccgtttccccctctttcgcgctctcgctcctgttcagcgggagagcccgcagagtcagggagggagcgagggaaggggtggaggtggcggggggaggccggaggggcggatcctgcctgggggctgatccctccctcccctcggccgggctccgtggcggcagcggcagcagcggcggctccattccccctcctcccccgggagcggcggcggcggccgggccggggccccagcgcgggccgggagggggcacggcggaggccacggaggcaggcgcgggagaagaccgcgctccgcttcccgggccgcgccgacctgctcggcggcctgcccgcccgcgcccaggggccccgaacggtggggccgggcaggcggctgaggtaatgggggcggcagcggggccggacagagcgggggcgggggcatcggggccttcggggaccagggactgcacggggggaaaccggagaagcggggggctttccgagcagggcgggggcggtgcgaaagctctctcctggagcgagggcggcggcagggaaggagaaggcgggtgagcgggggagctgagaagcgaggaccccctcccgcagccgccatcttgtctccccccccagccctggattccgagccgctaagccccgcccccgccacgccttccaattggcctggccagacgagagtcccgccccttgagcggccctaggtcccctgggtccctctgacgggcaggtgacgcagccaatgggttctcgcctctccgccccgctcattcgctggcgctcgctttctctgtctgagggtcggactccacgtcaggctgtctctggtgcgctcgcccctcccctctgaggagatgttatttccctcctttcttctccgaggggtcaagattcttctggaagaggtgcccccttaaaggagcaggagccttggctggggtcctccttgtctcctgagtatcttgtgtgaggtgcaggggatacagtctaattgcagaagctcctcattcttcggggacctggatggggtgggtgagcgaggggtcagggggtgccgaggggaaatctgggggggcgggggttgttggagatattttggaggtgtgtatgtgggaagggctgtgtaggttgagaaactcccgccaaaaaactcgtctagactgtaagctccttgtgggcgaaactcttttcatttccctcatcagcagtcccttccccctctagagtttctccccggtgtctggaggcgtgggtgggacaaaacacgtctgtgtagagtcttgcatggtcgagagatgcttgagcagccgaggaggtggcaggtggggaaggagaagatggagcggctttcatgaaagtgggcgccgcaccgcctgtctgcgctgtttggggtcggtgtggaggcagatgttctcacctcttctagggcctcggtgcctttggaggggtgggtgatgaagcaggtctgttggccctgtctgcccccagggacttggcatttgtaaggaatccagtagccaagggcctctggaacccggacagaattgctgcgatgattctgtttcctttggctccaaatggggtgtgtgccagcccgcctggcactgctcctcagccaaattggttttttgtttgtttcagtcacactttgggattggaaggcctttcaagtaaagatgttaataataccttattaacaagtagcacctagagagctagattgtgttaccctcattttactgatggagtatggaggcatagagagcttaagggactttctctaggtcacagagggccaagattagaacctagattgccccagagcctcgttttgtaccagaccatagcacctctgtggtgttcttaattcccactgagaggaattgagcatcggaagacctgggttcaaattgtagcgttatcacttactagctttacgttgagtgacatctttctgagcttctgtgtagatgataatagctacaccatctcctaaggtagttgtgagaaatattaaaagtaagagggctttgtagtttggaaaaagtgcttttattatcaccgtctctactttatatagatggtagaccctgcaaccaaggcgatgaattgtttttctctttgaaatcttctctttgttcatatccttccaagtctgcccacaccatggggccctgtatccccaaaggtctctcctggtggtgacagccttggtaactgcctaccgcagctccttatgagcttgtcatccagagaatgatgggggaaactaggactttctcttggctgtacaaggatagactagatatgagtgttctgggagagacttttgaggtaacagaatgcattgagagtttacctcagatactgcccagatcatcttggccttcggtcgaatgaaggtcctagacaggccactataacttcagagatctcttggagccactctcagagcttctagggtttgtttctgcctggaaatgtactagttggtgtatcctggatcaggggttcccaacccccaggccgcagactgtggcctgttaagaaccaggccatacagcaagaggtgagtggcgggcaagcgagcattaccacctgagctctgcctcctgtcagatcagcggctgctttggattctcataggagcgcgaaccctactgtgaactgcgcatgtgagggatctaggttgcatgctccttatgagaatctgactaatgcctgatgatctgaggtggaacagtgttcaccacccaccctcatctgtggaaaaattgtcttccacgaaaccagtccctggtgccaaaaaggctggggactgctgtcctggatggtgtcttttgtagggaataccctgcatactgtagtttgaagcccttagaccatgtatcatagatatttcagatgccttcaccccttcacctctaggcagggtcaaggagtagggtttctgatcgtggtaagaggtattgggagaagactctagtgacttttgatcctctgatggggcccattgttcacgtacagagcttgacagtggatgcttttcttgttttcttttctaaaccgttaactacatgtgttttccatagttagctgtcgcccagctttatgtacatcattagaacattagatctttccccatgttacactgtaataatctgtttacttttctgtcttttgagttagacagggctccttgagggcagggatcatgtgtgtttgatttcttctttcattcaactaatacttattgagtggttacttaggagctaagcactgctccaggaactggggatgcagcagtgaacaagacaaacaaaaattcttcccctcatggagcttatattctagtggaaggaaggaaacaataaacatagtagtaggtaaattatgtagcatggtataagatgatgaatgttaaagggaaaaataaagcagaatgaaaggtagattgctggtggaggaaaaggatttgcaattttagataaagtggtcagagaaggtctcactgagaagtgttgttcacttgaagaaatgaaagactcaaaggaagtgaaggagcaagccatgtggatgcctgaggggcaagttgttcagacagagggaaaagccagtcctcttggtggatgcttgatcatatgggaggatgaatgggtgcataagggcatccaactcatagtctcctggccttctctccttaggcctgtcccctcagttcccaggtgccatgaggaagcctcgtcggaagtcccggcagaatgccgagggccggcgttccccgtccccctacagtctcaagtgctcacccacccgggagaccctgacatatgcccaggcccagcggattgtcgaggtagacattgatggacgcctgcatcgtatcagcatctatgacccactcaaaatcattactgaagatgagctaactgcccaggatatcaccgaatgcaatagtaacaaggaaaacagtgaacagcctcagttccctggcaagtccaagaaaccctcatccaagggcaaaaagaaggaatcctgctccaagcatgcatctggtacttccttccacctcccacagcccagcttccgtatggtggactcaggcatccagccagaagcacccccgctgcctgctgcctactaccgctacattgagaagccacctgaagacctggatgcagaggtagagtatgacatggatgaggaggaccttgcctggctggacatggtgaatgaaaaacggcgagtagatgggcacagtttggtgtctgcagatacctttgagctgctggtagaccggcttgagaaagagtcatacttggagagtcgcagcagtggggcccaacagtcactcatcgatgaagacgctttctgctgtgtgtgcctggatgatgaatgtcacaatagcaatgttattctcttctgtgacatctgcaacctggctgtacaccaggagtgctatggcgtcccatacatccctgagggccagtggctatgccgctgctgcctgcagtctccctcccggcctgtggattgcatcctttgccccaataagggtggcgccttcaaacagaccagtgatgggcactgggcccatgtggtgtgtgccatctggatccctgaagtctgctttgctaacaccgtgttcttggaacctattgagggcattgacaatatcccgcctgcccgctggaaactaacctgctatatctgcaagcagaaagggctaggtgcagccatccagtgccataaggtgaactgctacacagcattccatgtgacatgtgcacagcgggctgggctcttcatgaagattgagcccatgcgcgaaaccagcctcaatggcaccatctttacagtgcgcaagactgcctactgtgaggcccactcgccaccaggtgcggccactgctaggaggaagggcgactcccctagaagcatcagtgagactggcgatgaggaagggctgaaggagggtgatggagaggaggaagaagaggaagaggtggaggaagaagagcaggaagctcaaggcggggtgagtggctccctcaagggagtgcccaagaaaagcaagatgagtttgaagcagaagatcaagaaggagccagaggaagcaggccaagacacaccctccactctccccatgcttgctgtcccacagataccctcttacaggtaagcatgcccagaagggctccttagggactcatggtttcttcttgggttggtgttggccctgtgccaggccttcgctaaacacagttggacactatatcctcctccccgaatttaaactcttccttttgaccccaggctcacctggcctggtttgtggttttgattttgccctcagagtaatgtatttcctttagttcaaagtgaaataaaacacttaagttacttagaaactcaggtgataggatatctaagacagtatttttcaataggggcactaagtgacattttggacaggataattcttcgttattagaagtgtcctgtacatttctagatgtttagtatccctggtctttgtaaatgccagtcgcatcccctcccccattgcctggtctttgtgacaaactcaaaccctcctcatgcatgttttcaaaaacccttggggagggtagaactaattacccagtgaagaaccactgtttcagaggatcggcatggccatctgctgtccagcaagttctgtcctgggtatgaggggggtggtggtgtggagagaacatgctattcctcctcttgaagctttagatttagggataagaggatcattcagttcagctgtgtagctaagctctgtggaccccccccccctccgcccccgccattgagtctgtagagagcccatggtacctgttttaaaacatcagagaggtacctggaaccattggagggatgggagcttggcagagaagcaagagatagggaagatttcctagcagagactcatctcaggggtggtgttcattaaacagtatacactgttagagcaggaaggagtcttggagactgttcatctgatgtagtccttgcaccttctcccacacccccagatgaagaaactgcggccaagggaggtaaagttgttcactcctttattcattcaatgatatatttattgagcacttaatacatgccatgtcctgttctaagggatggaaccaggtggaaagtgacagaccctataccacaagagctggggctcatgatgcctctaggttgcattcctgtagtccgtctctcttgatgagaagggtagagagaaaggagtgctggggaaagagttgtgtgagagctatgaataggcaaccagacttgccaggctgggaagaagacataagtgtgagatcagaagggggaggctcttattgccagttattacccaagttagaatttcagtgactctgtatgtgttttctagtcacagagctgttctaggttattctttttcctgaggtaagtgggtggatgcttagttcccatctgtagggtggttttaccctgaggctagaatctttggttgacatatatgttgttctagatgcctcttgctggggccagcagagcttgctggctaagaaccagacaaacctacatttgaaacccaattctgtgacttagtacctttgtgacttttggcaagttgcttagctgctctaagccttagtttatttgtaaatgaacccaccacatagagttgttgtgagaaataaatgagataatataagtaaagcacttagcacagtgtctggcaaatagtaagtgctcaataaatggtgactactgctgctgctgctattttattattgctgttcttttccctacctgcacaaatgctgttgggatcctccatggccaagaggtagagggagggtgctgcctacatctgggcaggtgtgcttggcatggacattggtcgggatctgtcctttggggagaggcctagttcttgattttataagcttggctttggggcaggaatgtctgactgtggagaggagcaaggcctaggtgagcaacgtcctgcccaacatgcccatccttctaaggtttcaacttgtttagctgtgcttatctttgtttcaatggagtggcatgaagagaaaaaggagaggaaacaccacaagagcactgaggccttgcttaccctgtggataaccagtctggggatgtaccatggtatagcagagagatcgtggattcaaatccaacctggatccaccatcttattagctgtattagttactttgacagtttattcagcttctgttcctatgctgcctttccatcttttgtaaaatggaaataatgatacccaccttgcaatatggatattaaagacagatattataggcttgcattagttcctctcctaccccttttcctcccccaaggagttactggcttaaaccctgaccttaagacttttgagtagtttagccagctgggttttcacatttcccatcctcttacatctttagatccaattttttttttcatttggttcaaaattaaacaacatttttaggctgttgaggtttataccatgaaaaaccagacgtcaaacaagtctaaggggttgcattgggctcagcctggttgtgggctaccccctggtttgatgggactctcagccgcagaaggcaggaaatagtggccacattaaccatagcttaccccagttcctgttccctttcgctgcttttataagaggaggctgggggtattgaggcataggcttgtttttcagtccgtacgtggaacaaggaagtccaggaccataggaaacgggactctgggagatggttcttttggaggattaggactgcaaggcaagaggtggaaaagcaaatgaaataactcatgctgaatctgagctgcttaactttactgtccttttcaagcctttctctgaggtgaggtatttggccattttattctgtcttcctgtataaggttcagaaatgaaccaggtctggataggatgcacaggctgtaatctgggctgcccactgaccttgtctttcacttccgtgtgcctctactcaaggttgaacaagatctgtagtggtctctcctttcagaggaaaaaccagtttatgcagcggcttcacaattattggctgttgaagcggcaggcacggaatggtgtccctcttatccggcgcttgcactcccatctgcagtcccaaagaaacgctgagcaggtaggtgcagtggtgatttgaggctggtagagggaggtggagagtgaaggaaaaggaatgatggttggggtggggctggcaccccttcttgatccctccatggagcctttgcctacctgtctgggtggcctatcccaggaacaacccccagcactacagagatcttcaagcagctccttctggatggatgaggcttgactttgtagagaattctaggggagagtggagagcatgcgtagctttccatatatgtggggaaaatcctctagatgtagcagaaagccagaagtaggctgaatgagagccagggtggccacattgtgttaattaggaaaaggtgccctttcctcaagacattatactgccatctgccaaaaaatgtttcatagtaaatacacaaatttacgatctaagttgtagcacacagcctgtccaattgtggtggctgttagccattagcaactggagttgctgcatgtttaatgttttctgctcctaatttctcttattttaactctttagttctttctccccctttacctgttctattctttctgtctttaagtgttcccacactgctgctccagagatgaagcaaagctttatgtgagtctggtgccttctgcattctgtctgatctcacttttgccttttataactaaactcctgaagtataagcctgtatctggccccccttgaaccttttggtccacctgctccactgaagcctcccctaaaacatcagctaccttctcccaggaagtctttccttatattctcacctgattgatcattgggctgcatttgacaccacaaatgactttgtctaagagcttctctgtgataccacttccggctgcttctacctctctgactgtaccctatgctgatcccacttcttgctctttaatggtaacattcccagtggctctgctatctgctcgtttgcttggagaacatgtccaatctcataattgacaataactgtaatagcagctccagactttttgtcttgtcctcatcccttttttctgccatcagtccctcagggatgtttccatgtggatgttgttaatttgtaactcaaatattggaaattaattatcttttttcctctcagtaaacttatttccccatcattatggctctcccctccctcctggactcatatcaaaagttccccaccttggagttacttttgactctttactccctaagggccatttttaatcatcctttaagctgctttgggggctttatcaacatgggtttttgtcttcattctgcagctctcctgctcatccatgccctcttaatctcagcaatagctttctaggtgatctccagcctctaattctttctttgatcttcaactggtagtttcttattcacatgctgttgggatcctccatggccaagaggttgtagagggagggtgctgcctacatctgggcaggtgtgcttggcatggacattggtggggatctgtcctttggggaaaggcctagttcttgattttataagcttggctttggggcaggaatgtctgactgtggagaggagcaaggcctaggtgagcaatgtcctgctcttccattctcttacttcctcttccagaatatactcctctttctaggcaggcgaagttaaggctcttttgccttacatttgaagcttcttattagctgtatcctggatcttccttggcttttatagttctccagcatctctgttctggccagcctgtttcacttactaagcaaagaatcactaattctgcctctatatttctgcccctttcatccctttggttccagaagagaccttccttactactttgcccatccatgtctgtcacctacctgtatgttaaactctagtaagagtcttcaccaggaagcttctctgatctaacctccacctactcagatcttctattttgtatcctcttagcattttatttccagtttatattattagtttgtattatctttatgctaatatgcccttgtgcttcaagctctaggtctcttcccttcccctgactccaactgtaattttttctagggcaggaatcgtgatttgtttgttgttgttttaccagagtatattcaggcttatagtaagaaccttgctttgttttctagccaagtgaaagctctagggtgaaattcttttcacccctgaggtcagttttcttatgaaattctttctgacccagagggccatagctgctctctggcatacctggggatagggggaagcagtcccagatcctactccagcaaaggttattgctttataatgaagaaacagtgctgtaatactggggcagctcaggaggaaggcatggggtagagaggggtggaagggctcttggaactgtgggtcaaggaaggggacaagacttttacctgctgcagccccgtgaggcttgaacagggagaggacttttgcaagaaggaggttcctagtccctcttctcttccctcctgtagcgagagcaggatgagaagacaagtgcagtgaaggaggagctgaagtattggcagaagctccggcatgacttggagcgggcgcggctgctgattgagctgattcggaagagagagaagctcaaacgagagcaggtaaggaggagcccccagccctagggccctagttcaaggccactttctcccactattagtctagtattgggaaatctgggagcccctgccttatgctaggtttctttctcccctccctacccaggattgtaggctccaagatctgcctactttgtattagatgtggtgctactgatggtttctatagtttggatttcagctcctggtggcctcaagcataagcttaatatcatatgcctgggcctgtccctgtattttctgattcaggaagtctctcagagggagcctggccttgaggattttgaaaagcttcttagaccattctcatgggcatcatcagttgaaagcctctggcctgggaacttctgagggttcccacttgactcttaaacacttatggtcctgaatcatttacattttctgtttctcctctgttctaggagattttaagcccttgagcataggaaatgttgaggtaggtagtgtagcatagtgtttaggaacatgagctatggcaccagactgcctgggttgaaatcctgcctcttctacagactacctgtatgacattaagcaaattctttaatcgcttaatacattggttttctcacctggaatatgggggtaattatagagcctacatcataaggttgttttgaggattagatgacttcatcatgtaaagagcttagaacagtgcctggcacatagtaacagccagagaaatgtcagctgctgtcattattattattatcaatactctttgcttctctgaagtgtctactgcacatggcagagagcaaatactgttaattaagtggatgaaaagccaaaactgttctctctggtctaggaatagcagctgtcactcacatgcttcagaggccagggttaaagatgttcctttcttgccgggcacagtggctcatgcctgtaatccctgcatttagggaagcagaggcaggaggataggttgagtccaggagtttgagatgagccagggcaacaaagcaagacctgttctccacaaaaaggggaaaaaaaaaagatgtttctttctctttctccaaattctaattcagtggtcagccttagcacaaccccttttctagcaggccagtagcctgagtttcctcctcatagcctgggcagctcatgccatatttaccatggatggccatggaggacatctcaggaccttcttcaagggttcaaaatgtctgtgctgtcccaggcatgatcccacagctgaacttctcatctcatctctggttcagagaaatgagagagagaagaaggcctggtcctggggaagtaggcaggcctgttttgatatagccaaaaggtggaaattttctatagtcttaatttgtggcttcccaacttttcacattagggcatatgtagaaaatagcatttgtacagcatactactgtaagtatatgaagctacttgccacttgcgggggcaagcctggaggccctggtgaccccatgctgacccagatgctccaagggctgatggaatcagtatctcagcacactgggaaattctggttcaagcacattttacatcatcattgtgtcccttggactaagtcagacctgggttcaaatcctatctctattcttttctagacagatgaccttagactagtaactccttcatcatgctgtctctaaacctcagattccatatacatttttttaatttgtattttttttcttttagtccttggtgatccttgttctgatccatatttgtaaaatggggataataatttctgtttcagggttatcgtgatgattaattgaggtaatacaagtacagagttagtgtggcataatggccaagagcactcactgtagaatcactgggactgaatcccaactctgctccttattagctatgactttaggccagttacttagtttcctctagtttcctcctagttccttagttacttggtttcctctttgtaaaatacctcatctgttcctacctcatatactcatttattttacataaaatgcttagaacattacctggcatttagtaagggctatagaagtgttaatgattataattgtaatgataattattattgttactgtaaattttagtatgatgtttggtacataggaaacaataataaaatagtagctgttggtgtcattattcctaggctaaaggttgggtgatagcttctcatatactggtcagcttaatattctatgaaaatttgttgtacaagattggtaaaagtcaaactatcaagaaaaagtttcagtacatctttgcaggggatgttctgatctgatctcaccccaccttccccacaggtcaaagtccagcaggctgccatggagctggagctgatgccattcaatgttctgttgaggacaacactggacctgctgcaggagaaggatcctgcacacatcttcgcagaaccagtcaacttgagtgaggcaagttccccctactttccaagtagtaaattcttcttgaactggaacagggtctgagtaggctaggaaggagttgggccacagggtgtacaaaaccaggggtaggagggtgggtctggcaaagctagtagacttgcccttgatgaggggtcagcaggccagggtgggccaggactgtaggtctttgagttagcctggcatggccaaatcagaaattgaggaggccaagagtattggtgaagggtgtgtctgtttggctagtaaatggttgttgtaattgtacaggttttatatgtttaggttccagattacctggaattcatatccaagccaatggatttttctactatgaggcggaagctggagtcccacctgtaccgcaccttggaggagtttgaggaggactttaaccttatagttaccaactgcatgaagtataatgctaaagacacaattttccaccgagcagctgtccgcctgcgggacctgggaggggccatcctacggcacgcccggcggcaggcagagaacatcggctatgaccccgagaggggcactcacctgcccgagtcacccaaattggaagacttttaccgcttctcctgggaagacggtgagaggcctggatgggtggggaggagaggggccaggaggaggcacaggaacagagtctacagagtgagggatcagggtggtccttggggctataggtagactccaggagcaaagctgagggtgagcacagactgaggtatacctttgtggctagaatagttctaagggttaaagtttaactaatgtactctgcacttcttaagtggtagaaaaggggaatcaggtactagtggtctgtttgaaaagcttaaagcctcatcagaggtcttcctctcttggatcccctctgtatggcattggagcatgggacagggagagtgcattgctggtgtgtgtttggctcattcagaagattgcaggtggaggaccagaaaaatggaattgcctctgagccccacacgctgcctgtccctgctctctgcttctcgatggcagcagccagtcactcaggccagggtattgccaagctgcctcatgcctgctccatggagcccataatcgtgactgtgaactgcttcctgcagacgtttcccagattctgaccttgcccctgtggctgccttctgggcagtggtgttgcagggccaaggcccacagtgacgctgctggaagctgctggcccaggcattccaagagagagttttgcatccgaaggattcggcccctttctcttgccctgtgctgggcaggtccttcagccccttctgtcctcccttctccctggcagtggacaacatcctcatcccagagaaccgggcccatttgtccccagaggtgcagctgaaggagctgctggagaaactggacctggtgagcgccatgcggtccagtggggcccgcacccgtcgtgtccgcctgctacgccgggagatcaatgcccttcggcagaagctggcacagccaccaccaccacagccaccatcactcaacaagacagtatccaatggggagctgccagcagggccccagggggatgcagctgtgctggagcaggccttgcaggaggagccagaagacgatggggacagaggtgagagatagtcacaggcaggcagggggttggagggtaaagagggacaaaggctaagctgaaatatcataatgggggtattctttctgagtttagatctgacacttgtgggcaagcaaaagtgcttggaagggccacacttccatgtatacgcagggatgatgttcaaaatatttaacaatcactagagactaaaatttatccatctcagtagatgttggctgttatattggagtgggctcccaaaggcccctgttgtggatatttagttgctggattgtggggagtttcaggtgctgcagcccagcagctgtttattagccaattaagtatgtcagtattttgcacctgatacagccgtattgtacataccagttaaatatcagcctaccttgtaacatcacgtggagagactctagagcaggttaggttggggtgtgaggtgatagcagagaaggaaagaccctgggcttttgagccacctcatggtttttaccccatctggctgaatctacaggcccatctcaagtagagaggccagactataaaagatagttggtttccacagtttttcttgatcttgagaaaagacaaaaaaataaaaataaaaaagaagaaaagacagccagggaagtgactctcagaaacccaggaaccttataagctaagctgcttctcattcttctccttcactggggatggaattgtctccctcatacctgccttcggatccgagcctatagcttgggagggcctgtcacgcacacagtcgaaaaggctggaagttacttccaatggataggggcccaaattgtaggtaacagcccattttattttaggttggcagagaatggagacatagttgagagatcacatttgacatcagagggcttttatgtccattgtgactcctctggactccccgtatgacagtcagcatgccatttgtatccctacttctggggctgtggcagtacagagttgtgcccagtaggccaacagcatcacctagaaaaaaaaaaaaaaaaaaaaaaggtgtagcctcacctcccatagattcagttagggatgtctgggctttggcttggaagtctcaatttttaaaagtttcggccgggcgcggtggctcacgcctgtaatcccagcactttgggaggccgaggcgggtggatcatgaggtcaggagatcgagaccatcctggctaacaaggtgaaaccccgtctctactaaaaatacaaaaaattagccgggcgcggtggcgggcgcctgtagtcccagctactggggaggctgaggcaggagaatggcgtgaacccgggaagcggagcttgcagtgagccgagattgcgccactgtagtccgcagtccggcctgggcgacagagcgagactccgtctcaaaaaaaaaaaaaaagtttcaaggtggtaggtgagcacacatgtttggcaaccactgatttaacttacttggtctcgtttttcacatttgtgaactttttctgcctgctgtacttgttcttacttgggtgatgtgaaataaaatcgattgacagatgagaaaactcttgagtccagtgagaattgtagatacctaatctgtcaagctgagacttaacctatttattgattaagcatgtggctttctttgtgtagagcaatggtttgcaatcctcacttcattagactcacttggtaagctttaaaaaacaaaataccctatctttacaaatttggtttcagttggtatgggatggagcctaggcattggaatttttaagaaacttcctatgtgattcttatacatagccagggttgagaactactagtgtagataaaacttacttctcctggggatgggtacagtggctcatccctgtaatctcagcactttgggaggcagaggcagggggattgtttgaggccaggagtttgagaccagcctgggcaacacagtaagaccctgtctctacaaaaatttttttgaaaaattagcctagccaagtgtggtggtgtgtgcttatagacctagctactttggaggctgaggcaggataatcacttgagcccaggagtttgtggttgcagtgagctgtgatcagaccactgcactccagcctggtcaacagagcaagatcctgtctctgaaaaaaaaaaaaaacctaatcctcctttctctttgcttcagatctaagaccttgaatgcatctcaagccttataacagccaatgcttttggtccttggttgtcagtgtcagtatctagcttgtaggagcagactctttctaaaatgttcaagcagattctctttttttctaatagatgactccaaactgcctcctccgccaaccctggagcccactgggcctgcaccttccttgtctgagcaagaatcccccccggagccccctactctgaaacccattaatgatagcaaacctccaagcaggttcctaaagcccagaaaggtggaagaagatgagctcttggaaaaatcaccactgcagctagggaatgagcctttgcaacgcttgctcagtgacaatggcatcaacagactatccctcatggcccctgacaccccggccggtaccccacttagtggtgtgggtcgccgcacatcagtcctcttcaagaaggccaagaatggggttaagctacagagaagcccagacagggtcctggagaatggcgaggaccatggtgtggcaggctctcctgcctctccagccagcatcgaggaagagcgccactcccggaagcggccaaggagcaggagctgtagtgagagcgaaggggagaggtccccccagcaggaggaagagacaggtgaccctgcctgtgacttctcttgatacttcgcatctgcttttctgctttgccttgccaaccagcaccttccccaattggccatctctctaatggcaccattggacagcaatagtagcattgagggcaccatagctcacagttgggcctggcatgttagtagcagccaggggaaataggctttgagcaggtattttccagagagccagattgtgtctgggattcattggccctgagggtaatgcaatgttgtataaagtaaaatgattcctaccttcatttcagttcattcatcaaatatttgtgttaggcactgttctaggcattgggggaaaaaatcaatgagcaaaacagacaaaaatctgctctcttatgggggaatatattaaaagcaaatgagtaaaccgtatcttgtattagaagatttggagaaagatccagcagggaaggaatgctagagtggtcttagagagggtggccaggttttctaaggaggtaacgtttgagtaaagatctgaaggagttgaaggcatgagctatttgtatgtctaggggaagaacattccaaaaagatagactagaaagtacataggtcctggaggtgggaacatgcctgcatgtctgaggaacactgagggaaccagtttggctgcagcagagggggtggggtggggtgaggtggtgatagaggtaggtagtggaggttccatcactaaagagagggtttttttttgtttttttgtttttttgagatgagtcttgctctgtcgcccaggctagagtgcagtggcatgatctcagctcactgcaacctctgcctcctgggttcaagcaattctcctgcctcagcctcccaagtagctggactacaggtgcccaccaccacgccttgctaatttttgtgtttttagtggagatggggtttcaccatgttggccaggctggtcacctgacctcaagtgatttgcccgcctcagcctcccaaagtgatgggattacaggcatgagccaccgcgccccacctaaagtgttcttaatatacatccagcaggagctagtcatgagtagctgtgaggaagtaataaaataagtcagacttaattccagctctggaaggttcacaggccattgggcaaatgagtctctcaaaatgtagagaaatcacagtggtggacagtatgttgttatttgtcaggtgagaggtagcattgctagaggtgttcagggaatttgagctgtaggagttgggctgagctggccctgtgggatgagggcagactggaaaggaatggttatgaaggcctcaggcctgggtgtgtgggaacaaggaggacagaatctctgtgagggacagcttagagaggggcttcccagagcatcaggagccaagactggatgggtgagatgggactgaatgtgaaggactttgaatgccgggcagactacttaggtcttggtgggttagggaagacccactttcttggcagggagggctgctcttggcttttgctctttgtgtccctcatgtacttttatgtggtgactttggactgtgtggccagcacttgcttttctgtcttcttgcctgacattttgttttcaacaataccttcccatctcgtctggccaaaacttttctgtgttaggggagtaagttggtatatagaggcaagagcttaaggcctggatttaggcatacctgcactcaaatccccaatttcttactagctgtgtaacgacaggaaaattaattaacttctctgagcctgtttccttattcttaatatggggtttctgatacctaccttgcagggttctaagaactagaaataccctttataaagcacttggcatatagcagtagatggtagcagttactgtcatcctgtcagttgaatcaggcttagccatacagtgctgagaacactgcattaaaagaatgaaagatcctgctgttgggaagtagctctgtacatgaggcccatccaacctgagggggcctgttgcttggagatactgctagaatcctgtctctcaccatcccagttgcctggcactcagggatacttctatacaaccttagttgaatctcacaaaaagaggtgttgatccttcgtaagtgaggcacccaagacacagatggcttcagtgatttaaattgtggtcataatgttagaggcagagccaggtcagaggatagacattgtggctcagacacctgctcttataggagggacttgcctcacagttttctagttacggtgtctgtaatctacagctttcaaatcaggtgcctggcccatctctgtacacctcttggctcagctgttagaattataggacttttagtgtggctagcaattggataaaggccaggcacagtgactcattcctgtaatcccagcactttgggaggctgaggcagaaggattacttgagcccaggagctcgagaccagcctgagcaacatggcaagaccctgtttctgcaaagttaaaaagttagctgggcatagggctcattcatgcctgtggtcacacctactcaggaggttgaggcaggggatcacttgaacccatgctattgaggctccagtgaaccttgtttacaccactgcactccgcctgggcaacagagcgagaccctatctcaaaaaatagaaaaataaattggatagataggagagtggaagccttcacttcaaggtcatatacctgggatgaccaaacagccttcattcgcctctgaagggctccccactataaacagaccttctctcatacatactgaatagtaagtaagtaaggtattatcttcacttcaccaaaggagaggtcaagagacctcaaagcaagagaaaaggaacctgtgtttcagagcccagcctagaaccccaggttctgactctccctcccaggaagttccgggctgctttagttccgctgaagagtgcccccatcctcactttggattagccctgtgagatatctcagggtgtggttgacaaagggcccttatccatctctagtctctcttgacaccacccccaaagaatcaaactagctgttgccagctgtgtgatgcataggttatgtgagtctttatctgaagaggcaaggtggttgggctcctgaaaaaggcagagaaggctacctgataatcgaggtttgaaattagaagcagatccaaggacttgtgagccagccagggtaggagaagtcttagtatctccctgtgtagccaaatgacagtagctgagtgagctgtgtgctatggtttccttaaacaaaaagcagaaggatgggaaggaaattgcagtgtctgctccttgccctagccagcaatatttccccccaaacttttatcttgatcagatcttctctatcacccaagacccatttctcacagggaaaggaatagccatcctctccactcgtcactgagccctcctgaggtggctgcctcaccctgtagcatgtgttgggaagggggatttctgcactcagactcactgtgtctgtccttggcaggcatgaccaacggctttggaaaacacaccgaaagcgggtctgactctgaatgtagtttgggtctcagtggtggactggcatttgaagcttgcaggtaagaacacattcccaaagctttgtcagcagctctgctacccctccttttactctccattcagctacagattgaacctcttcctgcttacctttttctctcttcccccactcctgctatttcctgaggcctcttatctgtaactctgggagttcctaggaaacagggtgacccttgactctcagatctgatctgagagaggaagagtagtgctgatgcttacagggtttgtggggctgaatttggactctagaggataagaaaagctaaatctcctgttgttcagtgaaattaacatttgagccaaagtcccctgctgcccctacacacatttagacaacccagccattacagagttggttttgctctttgccttttggggcgtcatagcctctttatagaggtgtggtgtaggtgtatgaaatgaccaagtaggaaatttggaattgcctttttttttttttttttgagacggagtcttgcttgctgcccaggctggagtgcagtggcccgatctcggctcactgcaacctccgcctcctgggttcaagtgattctcctgcctctgcctcttgagtagctgggagtataggcacgtgccaccacgcctagctaatttttgtattttagtagagatgaggtttcaccatgttggccagactggtcttgaactcctgacctcaagtgatctgcccgccgcagcatcccaaagtgctggaattacaggcgtgagccactgcgcctggcctggaattgccttttattcagacaaaggccccaaagctcttctgctgtccttgagctgaaaagagatggatttcttcccattcttttatctgaagggaggatttctcagaccagaccttaaagtttcttccaggcacaagagcttatggagcccctgctctgtgttctgtgttctgcaagacaccagggcggggaggactcttagaaatgagaaaccctcactgccacaaaggaaaagtgacttgtcctgaaggctaatgtcatggccccacccatgactgctgaatgggtcttaggttcagagtaggggaggaaaggtcccagggcagcaccagaagactatttgtgtttgaagtgcttccaaggcagactgggcatgtgttcttttaggcattcagtctacctgggctgtaggactactggtagggctgagggggtccccagctactcgttggcctggactggttccctgctgtggtttctctgagattcccctaccccccgccaaccctcagagttgccctagcttcctattgcagcctccagagatataggggaagtagatgggaaaaaattatcaggcacaggaaagagaaagatttcagaatcttacacgatgcttctagcctggccctgggttgaagttcctgactcccttcaaagataaggtacctggaagcccactttgttggggtcagggtaggattggacccatcaaactatccttttcttgctcttgactaaaagtgaaaggtgtgttgttggccccttcttctatgaagggcattcttttcagctatgagccacaagagcaagcaaggccaggctctggttagcctgctaattcaggtggcgtgtttgcctttctgcagaactccagtgcaatgcccttgatttatctggggccccttggaggaagtatgtattaatatttcagggtttaaaataggagatccaaaggcttcaactgcaagggttgtttttctttttccccccatactgtggtaataagtatataagggaagaccttatttattagaccagaatcatataatcccagaattagaaataaccttgaaagaactggtcactaacccatcccccacactccctttttcacttaccccttggtttatcttttctgatgattttctgagcaggttggtgctacatgtgctttctatagatcactcattcaaatattgataactgaacacctactgtatgccaggtactgttctaagcactaaggtgcctgttctcatgaagattatcttctaaggtgtctgttctcatggatatggatgttaaaccagtaaataagataactgtaggttgggttgtctgcttaggctggggtaacttggagaaagggctgaaatgcaggccatgattgagtcagttgtgcttttttctacaaatcaggaacatacagacctatttttggtgttgcatcctattttattgagctcatccttctcagagctcatcattctatagtacagtattagcagtttgtaatactttaagtaagacattaaaatttactatccttcgtatgacaataactacagctgtgtttattgactgcatggtatgtgctgtactgagagttttatgtgtgttcgttcattaatccttacaacaacacatggggagtgtaagcctcggagaagttaagtaacttgctgaaggttacagaactgataacaagagctgggttttgaacccagataggctccaagagtttaatttcttaactactttgctgtgctgtcttctgttgtatttgaagatgtctccccagattcttgatgtgaactttgatttgtttttctttttctcatcttgacgtgaactttgagaggctttcctgataaaattactagcactttacatttgtacaaggcctcaatttctctaatatgttggcagatttttatagggtaaatgggaactaaatcctaaatgtaaactgggtattttttgttttttcccaaacagtttctattttgactagcaataaaaactaccaacctaactactggttactgaaaaattatgattcattgggttttggttaagcaaagttttcttagcatacgttcctgataaagtcagttctgattcagtaaaacgggagtaccctactctccaaccagtccctactcctggctgtttcttatcccactaggggtttctttaagcatttctgcttttctgcagattgatgacctattctttaagcattttttagtgagaaaatttaaagttatataggagtaatattattttttgaagtttggatggaaaaaagtgctagccatatcatttttgcccagaagctacggtgtacattagaattgtatggggaacaatttgaaaatactgatgatgcccgggtgggcttcagttgcaacattgctttggtattgccattctaatttttgcttatcactttttagtctttgtgtaatatacattttgcctctttgcaatagtcatgaaacaaaaattggtctacttttttttttttttttttttttttgagatggagtcttgctctgtcgccaggctggagtgcagtagcatgatcttgggtcactgcaacctccaactccctggttcaagtgattctcctgcctcagcctcctgagtagctgggagtacagacacgtgccaccacggccagctaatttgtgtatttttagtagagatgaggtttcaccatgttggccagggtggtctcgatcttctgacctcgtgatctgcccagctcagcctcccaaagtgttgggattacaggcgtgagccaccacacccagcccactttttactttaaaaaatccacttctctctatccaagaaaaacttcacacataaaccatttggaagtgagaagtgcatttttttttccaatttaaaaatgtcttttctaattaaggaagtatgacatgtccactttagaaaatttggcaaagaggcaaatttttgaatctcaaaaataaattggtttctaaagaaaagcgatgtgaaccagagcaaagaattctgggcagatgtaagatggcccctgtcatggcaaagctgcttagacgctggaaggattgacaaatgactggtgtgacctttcctttggatgaagtccaaggttcctgagcagggaactgagcaactccttccaggttcagtccttccatgtagatgaaatggttcctcaaaacctcatgggaacttttcagtcaaaaacatgggttagtgtgagtttttaggggaaggtgagaaactgtcctccctgaagagtttttgcagctccactcctgtcagagaggggagaggggagaaggggagtcggcgttttagtcattgaaattgctcatttcacccctctctccctgctctgtgtgcagtggtctgacgccccccaaacgcagccgtgggaagccagccctgtctcgagtgcccttcctggaaggtgtgaacggagactctgactacaatggctcaggtgaggagcagtgttcaggcagaactgagggggccaggccttctgaggagccagctcttcaggctgctgcactgctggggctccgtaccaggcagccagtccttgagctcccccaaactcttgggcccttgggcagggagatggcactctcccaggccaatcatactctttttttttttttaattgcatcttaaatttgaataggttgtacatgcccatagtaataaaaatcaaaaaggtacaaaagagtgtataatgaaagctagcactcccctccctggaacatcaactgctagcattttcttttatatctttccagaggtaatccatatgtatacaagccaaaacttgcatgaataattaagagagtgagtggagaagcctaatatgcacatgttcctctaaaccattcctttttttccagctaataatatatcttggagatccttctgtgctttttattggcttcccagtgtcccattatataggaatgctatcatttgcttagccagtcctctaaaagatggacgtttagattgttttcatttattatcgtaaccagtgttgcagtgagcaaccttatgcatagataattttatatccatagggagcctatctatagaagtggaattactgaattgaaggaagtgtgtgtttgtagttttcatggatactgcctgtccccattcacaaacgttatcagtgatagcctgtatcactgaatctcgcacatacataaccctgtagttttatgggccttgtctccttggataaaaggaataaagggcagggcaggacctgggggagaggcctggggtggtgcttaggtgggacaggtgcagagcaggctgttctctgagctcatctctgtccagccctgctatacaggggtgtgtgctccctggatgccctgtctttgaagtgtccatctaacacacaggctgcagggcttctcttccttcgttcctttacccaactgctttattttcccttagcatcagtttctttctcgtatgtgtgttgatgaatgcatgcctgtgtgtttcattgctttctgtaactgtcagttcccaaaaggtcaggctcatgtctaaatgaatttgtacagcatctcacacaaagccaggagtggattggcacactttgtgcttctggtggtgacatcttattcttacttttaaaaccacatgcttactaaaattacgccaaaggatattgacctcccatagttccatcactgtaacatgattgtcttcatttttctgtgttgccttctgtttatttcaggcacatttttaacaaaatgctgacccaaacacatgcacttttgtattctacttttttcaatttttttttgtactttcttcatgttgacacataatctttatatatctcatattattggaacagtgtatctaacaatgcattataatttacttaaccattctattgttaggcatttgggttgtttccggcttttagcattatatgtaatgtagtgaacccatatttttgtttaaaatccttttattcatctttaaagttatttttctcagaataaattcccagggaaggaatttactggaacaggtggttcatacattttttaaatggctcttcagacatactgccaaattacattccataaggatgggtttggtctgtaattgcatcagtagtatgtgattgcaccagtttctactcagtctacctctttggtattggattttatctttttattgttactgctattgattcaataggtgcaaaatagtatcttataattttaatacatttttaaaaattacaagtggagttaagcacagtagctcatgcctgtaattccagcactttgggaagccaaggtgggagggttgcttgaagccaggagtttgagaccagcctgggcaacatagtgagatcctatctctacaaaaaaataaataaataaaattttttaaaaagtgaggtagtaatatttccttagaaataacaatttccaccctgttagatttggacttttttccttggttgagtgtggtcacctgcccattccagtgtatagatgtggggagggaaagagaggttcttctgtgtgttcagaagcatctgtgaagcactcattcacatgtgttagtgcgttgagtgcagagcaaagtaagatgaaaggatgcagtgcctgccccagggatacccagtctcatttctgacaaaagaaggcatgtgaaggacttgcagactgcttagctctgctgagtgccgtgcatccaggtgtcctagatggctaggtgtgaccctgtcagaaaataactcagttagcaagtaattttaccaggatgtcttccctggcatctttgtccatgaagcctccatcatgaggactccgcactcagggaggcccagagagcagtatgtggcattgcccaagctggattatggcccttctccctaaggccatgaggatgaagcagttaacatttttccagggaaagctgtcttagggttctagttcagaggtcggtaaactatggcctgtagcctatttttgtatggtccatgggccaaaaatggtttttacattttgaaatgattgaaaagaaaatcaaaagaagaatgatatttcataacatgaaaattacatgaaattcaaatttcagtgtccaaaaaataaagttttattgggacatagccatgctcattcatttatagattgtgtgtgtggctgctttcatgctataacaacagcagtgttgagtaattgcaacagaggccgtgttgcccacagaagctaaaatatttactatttggccctttacagaactagtttgctgacccctgatccagtctaacttctaaggaaaggagagggaaaaggaagggtggaggggatgttgtgactcattcctgggttgccccagtcaagtggaggccacaggcaggccttttgggcaccattccaagtcccctttgggtgctgtctcctcccctcccccacccccaggcagaagcctcctgctgccctttgaagaccgcggagacctggagcccttggagctggtgtgggccaagtgccgaggctacccctcctaccctgccttggtgagtctgccccagacgccaccctcctatctcccctgccttgccttgggggctaatctgattggattaagccagcagagtgtggtgggagtcagagtgtctttagctgtagaggggaggggggttttgccccagcctgagtgggtcaaactagcaaggctcccagcttggagcactaaaaataggctaaaagtatgcagatcaaggccagggttcttagagttttaatagcatttatttatttccttatgcataaaagtaacagggcccattttagagaatctttaaagctactgataatgcttagacgttttattaaatatttgtcatgctaagtccttgaaatactgaggaaagtatgattattacattttgtaagaagaaaactgatgatttgtggtcattcagctaataaatgacagggttggaatttgagcccagggcttaaaatgtgtgatgtcaaagcctgtgttctgagccactgagttcaaaatcatccacagtcctgcagggataacttggggtgtatatccacttactcttttacaaaaaatgtataaatatgcatatatatgagaccatattgcttttagcctccctttcacttaacagcatatcatgaacatgcacatcttatgccattaaacattcttcatcaacatcacttttaatgattgcatcgtcttcagttgtatgcatgtaccatattttaaccattccctagttggtcacttacattgttttgaatttttcactatgataaacagttggcaataaacatcattgtagttttacccttgtgcacatccatgattatttccttacagtgaattcttaggagtcccttcttggggcaaagtctatgcagaattctgatacaagttgccaagttgctggaagttcattttggtttatactcacaccagcagtaactaaacttttcatttctgtcatagtagtagcagttaaaaattcaatttttaccaccttgattgttatttctgaactctttctcagttggggaggtagtgtccacctagctctggaagataccactgatactaaacctttggggcatgtcagaataatctgtggaaatttttaaaacaatacccatatcaagtcacctccaccccagcgctatcaaattagactctctgaggccagactgaggcatcaatattttttagaaaacatcctagatgatctgtagccagggttgggaaccaccccaccagcctcttacatgtatacaggactctgggtttctcctagccccttcatatctgcaacttttaacagcagccttttaagataaggagaggaggaattctgatcctgtttggtcagataaggaaattatagctcaaagaggttgtattaatacagtttgttggaaccatattggaaaccatgttgcctactctactccctccttagcagtagcaggtggggaaaatccatactgtgacctagcagctgaagagttagggcctggggctgcctgccttcacagggctctctgccctgccagcggtgaaaccgcaggactcccagctcagtcattaaagaagtgattaagctgtgcaggtttggatttaaaaaacaaacagacagaatacctcacaatgcaaaaaaactagtctaaaactcgtcttttttttaattaccctcttaattatacattttgtcatgattaaagaaattcagccaccacctgaacacaacctgtgtttttattttggtgtatgctctcctagtctttttcctatgcattcttcagtatgtatttgcatccataaatagtggatataaagtttttaattttttctggctcttgtcttttttttcttgtcttttaaacattttttcttgtttttgtttttgtttttgtttgtaagagtaatatactgcattatagaagtttggaaaaatagaggcgaaaaaacacaaaccccaccattctaatgttgactccaagcattttgtatcgttctatttattgttcgcatattcatattatagttgtaataatagtgtatgtacacatatgttaagttttatcacaaactttgttaccatgttgttttacatttgcatagtattcattgaatgaatggaccatttattattttgggacacaaaagctgtcctcagttggcagacttacccaccttgcttttgccctcaggggaaatttttcacaatctaccctctgcaagcaccctgggttccaaggcaggaaccagcatgccttagtcaagaggaaacatatcagagtagcctcactgtcttgtttggtaatcaaggaagcttacaagggcttgtatggtggttctccttaagaccctttacttcaatcccaggagggacagacaggctgggagagagagttttgatcaaattacacacctggtgggtggggtaaggtggttcttccttagagtaaactcctaaccagaacagctgctttcagctgcttatcttgagagggatgtagtgaaattggcagacaagcaaaggtaaataatgagagcagtttattgtaagaaggggcccactgggacagcgtataggaagtaagattgctctgtctctggagaaggctgcttcctcagtaagttcctagtctttgctcccagagctattagctgtctgctctggaagcaggggctgtgtaggaggcagtgggctgtggaggcccaagccttgtttggttttagtaccaatgtggttttagccagctacattctgcttctgtgcttggtgttttcctcttgtcagctaacacctgttagcagacttctcagcatcagcaagagattgaaatgagatgatgtgtgaataattaggagctttggaaactttgaaagtgctccctagacctggattttgattgttgtgttgatgctgccaggcattttgctgagcacctgccgtctctgagccaggcaaggtggggctggatgccagaagcaaacctgaaggagaagggcccagctgctgcccttgtggagcttattgcctcaaggattaatgcctccagtggcccttgtttccacccacatcatacccccctctccatcaacctccaagctcattctctagctatacactgagcctcctctctgatcttaccatggaggtgtcacaaatatatctggtccatgtatcaggaaggattgtagtcagacaggaaggtagtgggtaaccagagacctcgttagaaccaactggatggccttcccgatgcaaagccttcttcatagccgtggtacctagggaaggcccccaaacatttgaggtgaattgcaaaggtactaaggggaaattgacaggaaaaaaaaagtgacctctactcttctgtcctaagggacattggaggaaggggtttgcctgtctggtctggacatcaaagatatcccactcaggcctgatactcccctggtgtgggtgcttcagcagttggtcctgcagcaggggcactgctcaccctggcctccctcactgagtgcccatcttctattctgcctccagatcatcgatcccaagatgccccgggagggcctcctgcacaatggcgttcccatccctgtccccccgctggacgtgctgaagctgggagagcagaaacaggcagaggctggagagaagctcttccttgtcctcttctttgacaacaagcgcacctggttagtgggtgctgctgtgagggggctgaggggcacgccaggggtctgtgccagtggtgctgtgctagtgaggtgtacagaggggccatggatgttaccagttaccctggtctccacttgccagcaacaggcctgcacttggcatgttaatagtaactgaggggtgttgcagatcagattccctgggaaacactctgaggtcgagacttgcatcaggaggctattgaggagagctgtggggcgggagcgatgcagcactgggcagaagttgaactacagcccacttgctgcctcagctcatccactgggcacatctggagctgggtggctcaacaagataagagatgtcaggaattgggcctgtgcctttttgccctgtgccaactagttattcaatgccactgccctgagggaggggtgtggcctgggcctgaggcttccatggtggagagtgattcctagagagggactcagatgagagcctgtgagcttccagcacttccagtagcttctgggaagcatgtttccgtcctgaggggggttctggccagtgcagtgtccgctacaggagacttgctcatttatggtttacaacacttaaggtttctcttagcaccaacaagagagtgctttcaccttagcttctatagagtgaggagggagaactagctaataaaaacagtgataatagtagctgccattgagtgcttactccatgtccttatgcagattgctttatatatctgatctcttttaatcctcatttaagtcttcattaatcccctcataatccattttgcagatgaggaagttgaggctcagaaagtccagaccctgtagccagaactaagatacaaaacaagatcttgctccaaaggctgtatccttagccacatgttatattcacccggggagctttaaaaacacatacacagtgtgcaggtcccaccacagatgagtttatcagttcctggcatcagctctacttcctagccatcgccccctaattctccaacgcaaggcgaggctcagagccctccagggtggctcagctggccccagagggcagcaggtgggcctttcttagcctatggacccttacaactctccaaacagagtaagggcccagagaaggacctagctgcaaaattgattccatgccattcccccacccgactcctgcatatcctgcttgctgtcctcacctgctaggttcttggtggcctcctgcatggagtcccccaatttgcttccctctgccctgtaccctctccctggctttgctggtcctggccaagtggggccacaggagcccgagccccctgtgagacccactactgcccagcctcttactgtgcttgcatttcaggcagtggcttccaagggacaaagtcctgcccttgggtgtggaagacaccgtggacaagctcaagatgctggaaggccgcaagaccagcatccgcaagtcagtgcaggtggcctatgaccgtgcgatgatccacctgagcagagtccgggggccccactccttcgtcacttccagctacctgtaagggcagggctgggcctgcatccgcttgccctgcctccatcccgcagggcacagagaagcctcttctgcccctgccagatgtatggccggcagcttccccctctcatggtaggccagggactgggctttctccccactaagggcaaggccccagttttgaccaatcgcatggttctcctggcaggcctgctctgtgccaaaaactcccacccaaggtccctcaggggatatttcactgaagaaccagttagaagtagaaacagctgtggggcttgggcccagcttaggagattgcccagatggcaagaggtcctgggctccttcttgaggggctgcctggcccgctccatcctactcccactaactacacctcagggcgggtgaggttccgacactgatcccagagatgccgtggatacgccagggtcccagggggaatctccccaagctcacactctctcccgcttatcgcctattctcacacctcttctcggtcccatcttctgcacccattgcccagtcttgctttctctttcccatattccttttctttttctcttgtgccaaactgacagaaaccgtcaccacactggtctttttctttaatgtctcattccccttgaggccagctgctatgccaggtggtgtctctgccaggctcctcaggcccagacagaggccagcccacaacctatgaccccctcccccaggacaccacctcccacccacagaccttccctttagctgttgacacaacttcccagctctgcaagtgtgccccctggatcaaggcgggtcccctcttgtttttttctttgctgccacgaggtggtccaagccttcagggtgggctcctatcaggctgggtgtgcgagtgtccatctgtccacatggatgtcgagggtggtttgtgtggagctgtgctcgtcagctgggtctgccctcttcccccttttctccttcttctctcctcatggactttttctgcaattgcagtcttaagcttcactctccaccacctggatggcatggcgcctgccaccaaacatcttcctggcctgcgctctgccctgccctgcctagcctctgctactcccacttcccaactccagggaatgcattacttttatttcaaaccctctgcctccttccttctttctcttcaaccccctccccaccttcaccttctcaaaaatggaaggaaaaaaaaactgtgaatggggaatgctgactgacaaaccaacacaactttcagaggcttcagtgtctgttctctggacatttcttttcacctcctgagcaccaaagtcgcagggccagttgcaggccgctgattgccatgttgatttttaacctgatattctttttaattgttttaaatttttcataggggagttttggacaaaacagtcactggggagatcactgccatttttacacacttgactttttaaaaatacaaccaaccaaccaccacaacttcttatacatttgggacatgagccagagtttaaaagggaaccaacaaaacactataacttaaaaggatggggttttggattttgtataataataaaaacaatacagcatatggctagggaaggacatggtgtatataattgtaaaatactgttctaaattattcaggcctatagtttccattactggagtcctccattgtgtggccacacagtgtcgttgatttaaaggagccagtgcttcccctctccccaggtagttggtcagctgtggactctgtgacctttgtctaaacctgtgttgtaagatcttgggacttcctctctttctatgtctatctcttccccccaacactttctcttcttagtctctctctttatttttcaatctctgaatattttagtctctctctgagtctcattttttaaaatgctcttttagaacgggaaacggctcagatcctgctgtggcacggggcctatgtgtctctgtcgcgtctgctgtgaagcacatgatgctctatttattgtagagagtgactttatttgctttctagaattgtttataacagatggtataagagaggtaataaacagagaaaaatctatgcttgtaaagaatacaaaagttaattttacctactataatatgactgtctgaaacttattttctctctgagaaataaatgttctaatgggcagtagttgctgtgttgtgtttaatcagtaggggcctacccctgtcttcccattccctacagcctcctcctcaacaggccaggaccattaagaaagtttcctagctagcgagggctgtatctttctttttttttttttcttttgagacagcgtctctgttgcccaggctggagtgtagtggcatgatcatagctcactgcagcctcgatttcctgggctcaagagatcctcctacctcatcctccccagtagctgggactacaggcacgtgccaccatggccagctgtttttttgttgttgttgcccaggctggcctcaaactcctggactcaagcaatcctcccgccttggcctcccaaagtgctaggattacaagtgggagccaccatgcccagcttctgtctatctcttggacccctaggagcagtgtgaggatgttctctgactttgcttccctcccggacagcgctggcaccttctgggagctgttggaaggtccatcctaccttcccatgcctcgccttccctgtggccatgttcctttaggagcctctgctcctcattcagaaggagagtgaccctttggacacacctgacttaccaagcttgctgaacttgagactcaaggatgctcacacctcttatgtcactgctgctgttttaattctgtagatgggtagctgggacacacacaggggaatataggcctcactcctcttaaagctggaaggcatccttaagcctacctggtcttcattttacagacaaggaaacagaccagcaaaattaaaagaccaaggtcagccaactaagaaactgtggcataattctgagacaaggatctggccaaggctttgtttatgggctccacagcatttcaagactccactggcctattctgtatcgtgttcctctctcagtggctgtggctctggcatttctggataggaatgtcctgaagagcagaagcagaggggagttcccagagacaaactgcttggttgctgggcatagaatagcttttcccctgtccctactcctatcccattctggtcctacctggctcctatgcttgtctcggtgtggctgaggactcgggtctcttgatcacttcctccacggggcctttgacagccttgtcattgaagtcaaaaaagtgtcaaagttctcattttggcctaacactgacaaagtactgccaatgtgctgataatccttgtattacgtgttggggctgcaaagacacacacccctggtctcaagacactcacaacctgatttataagatacatctcacataacgccgcataaggccagtgtgagggtcccagatatgtggaggcgtttgggagagacatgtttggttggggagtaatgaaagccttcagaagcagcaattaattcaagccttgacaaatggggttaggaaagactttatttatgaattgtaagttgaattacaaagacgtttgcaaaatatttacaaaatatttagggtgaaattacaagctcattctataaaccattttagaaataaaagtggccagatgggtaggattttagcaggcgaggctaagaagaggagacaaagtcatggctcagaaagagattgtgcatattccagctccagtgactagctgacctcccacgtgactggaacccaccgaggtggcgagcagtatatcgggcttaaaagccctgtcactgtcactcactctgtgaccctgggcctctctgagactgacgtaataaaggatcccaaagacagggcaaggtgggtgccattcatatatggcaggtagcagcatccattgaaagatttgaacagggcagagacttgattggagcttggcaactaactaaacatcaaagttaaaaagcaagagtgttaagacaggatgctgggtggctgctggagggatcgctgtgggttttgaagggaggagaaagtgtaggttttttgatgagtttgtgttgtctatgggacatctaagaaatacctccagcaaacagatgggagttgagcccagaattcaggagaaagatgggagcagatgacagagatgtgggcacagtggagcccacctaggcagttagaagaatggccaaggacagcaaggaaggcgaaggacagacatgaggaaagccccttacacttagagtctggggttgggggaaagggggagacagcaccttttgaggggtctgttctccagggagggcctcacagggaatgtcaagccctcatgccacagatggaggagaaaggcaggtcagatgtgcttagcatcacaaggcaggaaaaggcagggctggaccagaactcagcacccactcagccctttctgctctccacggacttatatattacccaaagtaggcaaaagtgtccttaataaattttatcaatgatgtgactgaaattcatgaactcaagtctaaaatgatactgtaatattgggacatgtgttggagacactctgactctcggaatagagaatcccattctcctaacaagttaaaaaatatcattgaaagcatttgccaaaatcccttgtcagcttggctgcttccattaatatattagatgccattagcacctgagtgtgaatgtgccagtgcgtcagatgggctctcctgacctggctaggctctgagtttcacttttagagaagaggtggggctagtggcaagactgccaggctcggagtagtgctgaaggagagagggagggtgtgggccttgactaccctgagtctgcaggcctcccacagtgtctgcagtcgggcaatgagtgtgcaggtctctggtcctgctggctgcagccttctggcctctactgaagctgggatgagggaaggaggtctttggaggagggaagtggtttctccaaaaggtggggcagaagtttcttactctgtgatgaggaagaagggccagggagatacgtgctgggctagagctggagaggagtgctggatccaccctggtgatacgagagaagggcagggaagtgctgggtagagaagaatggggtccctggtgagggcttcaccctcaggcctggtccacggacctaggtgaggacaggcacccttgtttttgagcccaaatgttgcattttccaagaccactctggcccgccacgcccctgatcctgggcccgtaaaaaccccgagaccctagcgggcacacacacacagccggctggaagtccagagaagcagaacacaccgaaaggcaccaacagatgccgacaggctatcgacgacgccacgatgacgtgaaatttggcacagcgcggtcggagtccagctgccgggcagcccaattccaggtgaagaccaccttcccactccatcctccttctggcctccccattcacctcactgagagctacctccactcaataaaaccttgcacccatcctccaagcccacatgtgatcctatttttctggtacaccaaggcaagaacccaggatacagaaagccctctgtccttgtgataaggcagagggcctaattaagctgattaacacaagctgtctgcggatggctaaactagaagagcataatgtaacacacacccactggggcttggggagctgtaaacactcaaaccttagacgctgcagtggggtcggagcccacactccccatgacctgcctgtctgcatgctcccgctaggggtttgagctatggggtaccaaagaagtgagccacacccccattgcatgcccagcgagggggataagagaacttttcccatttcactggcacctggggtgaccttctgtctgccctttcccttcgagggtggcagaaggtaattggggatagacgaaaaacgtccgtgtgtgtgtgtgtgtgtgtgtgtgtacatatacataagtattctcttcaactttaatagggccaggactcacgggctacatgcagtcaaacactctactactgagctctacccccatcacaggctacatagagtcaaaaaagctagttgtccccaaatttcagaagggccgtggtgctgtttctgagaacattttatgtcctttgcttgacacctgtaaggctggttggaagagggtggattcagttgaactcctgaagccgtgtctcaatcccttcctcttcctttctgcctagtattcgtccgtttgggggatagagaagccatactggggatgcgacgttgatggttcctcatgggcagggagtatcacataagggtccaggggtgggctccttcccttcagcttcacagtccagagtgacgcctgaaggagattttatctaagctggtcaggaaagattataaaatccgtgggggttttttgtatgtaatatgggaaaatttttaagtgcaaagaaattaagaactaccctttttctgaccacacagaaactaccattttaatgtaattccttatagtctcttgttttttctaggtagagcatgtattttagtttcttgtactaggtagttgagtagtctgttacctctctgacatcactgcggaaattcatggtacgactgggatgcaagtcctccccacgcctcctcagcctaagtctggctttttctcacttgctgttgttcatggactggcctaaaccaagcattgcctgttagttcctctgttttgttaaaatactgatagtctccatagcatttgaaattagatgggagctatatatcttcctcccaacaactttgctctcttgggtaaatttccatggaattcagtcctagaccaaattctgccccatgtacaaacatctaatgagtgaggaagccaccatatggccatataattctcctcttgattgagaagttcccacctctgcttttgggtacagccaccagcatcgggaacgaagatcactccacagcagatacaacatgcttccgaggtcaggaccagttagtggagtagtcaggtcaggagcaggaggaacagaccccgaagtttgagtattttcatattttagatatagttttacatacagtaactctgggacacaaatcttaagattaatctctatgagtgtttatatgtgtacccacccatgaaattgtgatccaaatcaaaatacagaatgtttccagtgccctagaaggttcctcatgaccctgtccagtcaggacccctgctgcaagtgtaactaccatccagacttccattgctgtgggttagtgttgcttgttcttggacttcacataaatggaatgacacagcttgcgctcttttgtgtctggcttctttcatttaacattgtggctctgagctccaccctgttttgcatgtagctatagtttgctttttgttgttgctgagtaatattccatcatccaaacacaccacagtttgggtatccattctcctgctgatgggcactgggttatttctagtttagggctgttataaataacactgctgtgaacattcttgtacatgtcatttgatggacataagtgcttgtatgtcccaggagtggaattgctaggtcacggggcagatatatgtttagctttagtggattctgccagtttcccatttggtgttcaatttatatcccctcctgtatgagtctgatcttgcacagctccccacctgtattagtctgatctcgcacagctataaagaaatacctgagacttggtaatttataaagaaaagaggtttaattggctcacggttctgcagactgtataggaagcatggctggggaggcctcaggaaacatagaatcatggcggaaggggaaggcgaagcaggcacatcttacatggccaaagcaggaggaagggagcaaagtgggaggtgctacacactttaaaataaccagatctgagaactcactatcgtgagaacagtaagggggaaatctgcccccatgatccagtcacctcccacccggcccctcctctaacactgggaattaaaattcaatatgagatttgggtggggacacatatccaagccgtatcagagtatagttgcttcacatctgtgccaacacacagtactgctggtccatgatgtttgctccagacctgcttgttgaatgacttccattaagctccactgtgcagccaggcttctgttatcctttacagcactttctggctttagagggagaattatgaactgccaaggtgcttttcaactggggaaccctgattgagaggatggtgaggggggagagctccctggagtggatttgctgctgatcctgtcctggactccagggcatgtatgcacctggctgtgcagcccaggcctctcttggcacccacttctgtactatggtgccacccagatccctgcatgggctgtttgggagatagggtcacactgggcagtcctttttagttcagagtaacactacctttcccacctcatcctcctcatcactgtcattgggctctgagggacccacttttgctcgaggattgcttttttactttctgtttttgttttcttgagatagggtctcactctgttgcccaggctggagtgcagtggctcgatcacagctcactgcaatctctgcctcctggggctcaagcgattctcccccctcagcctcccaaatagctgggaccataggtgtgtgcaccaccatgcccgactagactaattttggtattttttgtagagatggggtttcgccatgttgctcaggctggtcacaaactcctgggctcaagggatccgctggccttggcttcccaaagtgctgggattataggcgtgagccactgtgcccggtctgagggacccacttttgaatacagaccccagcctgtgtcctgaggtgttatggttaccggtggggcagaagggacccctgcatattgcacccattttgtccttgtccactggctgttgcccaaaattctacccttagtgctttatgcttttacctctcaagggcatgatacttagggacttggcagtgaccctggttagagtgggcctgttttcctttaaatgaccggtatcccagtgtgaacaaaggatatgtgagcaggttttgataaggcaatacagcaaggacactgagtccttgaggggaaggtttaaaaggagatgaaaagggcctacttgctgttggctgaccttggtgccacagacgcacatttcagagtcatcaaggatgaaggctcagaagactctgaagcaacttcaaaggaatcgcttggatcacaggtggggtgaaggttggagataagaaggcagggccagggaaagagacccaagggagcctcgtttggaagcaaagctctggaaacaaaagactgcagagccagggtcaacctgggcaactgtttgaagccagccccgtcctcaggtgcaagaaagagcattctctgggtctaagcctgagttgtgcgcggaggacacaggctttcctgggcaggactgcaggcttctggctccactcgtgcctgtggcacacacaggttttgatagccagagcctggccagtcctcctctttctgctccctgtccctcctgggaccaggacttggcctctcccctccaccctcccttctcttcctccttcccttctttgtctccttctccttaaattttgtgatttttaatttcaattgatttattgcccctccttgtccccagcctcccagttctcctccccagaggaaaccagtttcaccagttgcatgtgtaagtttccagagacactttaatctatgcacatgagtgatgtgtgtgtccactttttctatacaaatggtagcatactttttatagtgttctaggcctcatttaaaattttaaaattaaatattgagtagatacaaaaatagtagttatagaatatatatacattttaaagacacccacaatacaatagaccagtatgggtacccacgccctgttttagacaaagaagctgggcttttgaaaccatgtgcctctctccagccccaccctcctcttcccctaaatactatcatgaattttacgcttatcctgccctttttgtctttttataatcctactacttgtttataatagattatgataaatatactatatttttatactaagataaatgtaataaacattatatataacaagacataaatatatataataattgaatatggtatactacctttttgggattatgaatagaatagttttctatggctggcttttgtcccacccataattatagttctgaagttcagtgtactgatacgcatgtccggagttagttcattttcactcttgtatagaattccattgcatggagatagtatgattattttcattggactattttatttattaataataattattattgttttctaatttaattttattttttgagacagggtctcattctgttgcccaggctggagtgcagtggtgcaatcatggctcactgcagcctcaacctccagggctcaagaaacgatcctcctacctcagcctcccaattagctgggactacaagcatgagccatcacacctggctaatttttaaaacttcttttatagagacaaggtctcactatgttgcccaggctggtcttgaactctcaacctcaataatcctccggcctcaggctcccaaagggtggctcatgcctgctgggattacaggcatgagccactgtgcttggcctcagtgctggcctcagttttggggttctaggaacagagctggtgcaaatgttcttaattgtttcttttggtgtgtgttggggggaatggcgggggttgggtaagaacttctccagggcatttgcaaggccattgggaaagtacattgtcaacttcagtagataatgccaaaattttaaaaagtggttataaccattcgcacacccactagtagtttgagcattcccctcactccacttcttcaccaacacctgcaattatcagcttttttttttttgtagatggatctgtgtgaaattgtaactcactgtggttttagttttcatttccctggttatgcatgctgccttttttttacttaaaatatgtcttggtgactgttccgtatcagagcagtgaggacttcctcctcctttcttggctggaaagtgttccatcgtcatatggaaatcttgtggtcgatttaacccgttccctattgatagacgctgtgtgggctccagccttttgcagtcgactctgcgatgcataacttcgtgtatagatagcagtctgcagctgcacgtgggggtgtgtgcatgtaggtttttcacaggaacctcctgaaatgcttagaagaaaaggaaagatagtgtttgctcccccggccctgtgcctccctattttcaacaaattcccttaattccatgagtgccccagggtcagaatggtatccaccctgtcctgtttgcaccgtaccatctcttctctcagatgatgatgttcatctcccacccgcttcccttcgagccacccccacctcatagactcctcaggaattgtctctacccggcatctctcactttttctttcttttttcttcctttctctctttctctttcttccttccttcctttccttccttccttcatttccttcccttccttccttccctttctttctgtttctctctctctctccccctcccttcctcccttccttttctttccttctttctttctttcctttttttttttttttttttgatcagggttcttgctctgtcacccaggctggagggcagtggtgcgatcatggctcactgtagcctcaaactcctggactcaagcgatcctcttgcctcagcctgccaaatagctaggactgcagctgctcgccgccatacccagctatattttttgtagagacagggtctcgctatgttgccttggctggtctcaaactcctaggctcaagaaatcctcccccctcagcttcccaagtcactgccagacatctttcttattgacatccccatctcgagaatccaagttagtattaactgaggga

SEQ ID NO: 192 - DNA, 5994 bp, Homo sapiens
attccccctcctcccccgggagcggcggcggcggccgggccggggccccagcgcgggccgggagggggcacggcggaggccacggaggcaggcgcgggagaagaccgcgctccgcttcccgggccgcgccgacctgctcggcggcctgcccgcccgcgcccaggggccccgaacggtggggccgggcaggcggctgagatgaggaagcctcgtcggaagtcccggcagaatgccgagggccggcgttccccgtccccctacagtctcaagtgctcacccacccgggagaccctgacatatgcccaggcccagcggattgtcgaggtagacattgatggacgcctgcatcgtatcagcatctatgacccactcaaaatcattactgaagatgagctaactgcccaggatatcaccgaatgcaatagtaacaaggaaaacagtgaacagcctcagttccctggcaagtccaagaaaccctcatccaagggcaaaaagaaggaatcctgctccaagcatgcatctggtacttccttccacctcccacagcccagcttccgtatggtggactcaggcatccagccagaagcacccccgctgcctgctgcctactaccgctacattgagaagccacctgaagacctggatgcagaggtagagtatgacatggatgaggaggaccttgcctggctggacatggtgaatgaaaaacggcgagtagatgggcacagtttggtgtctgcagatacctttgagctgctggtagaccggcttgagaaagagtcatacttggagagtcgcagcagtggggcccaacagtcactcatcgatgaagacgctttctgctgtgtgtgcctggatgatgaatgtcacaatagcaatgttattctcttctgtgacatctgcaacctggctgtacaccaggagtgctatggcgtcccatacatccctgagggccagtggctatgccgctgctgcctgcagtctccctcccggcctgtggattgcatcctttgccccaataagggtggcgccttcaaacagaccagtgatgggcactgggcccatgtggtgtgtgccatctggatccctgaagtctgctttgctaacaccgtgttcttggaacctattgagggcattgacaatatcccgcctgcccgctggaaactaacctgctatatctgcaagcagaaagggctaggtgcagccatccagtgccataaggtgaactgctacacagcattccatgtgacatgtgcacagcgggctgggctcttcatgaagattgagcccatgcgcgaaaccagcctcaatggcaccatctttacagtgcgcaagactgcctactgtgaggcccactcgccaccaggtgcggccactgctaggaggaagggcgactcccctagaagcatcagtgagactggcgatgaggaagggctgaaggagggtgatggagaggaggaagaagaggaagaggtggaggaagaagagcaggaagctcaaggcggggtgagtggctccctcaagggagtgcccaagaaaagcaagatgagtttgaagcagaagatcaagaaggagccagaggaagcaggccaagacacaccctccactctccccatgcttgctgtcccacagataccctcttacaggttgaacaagatctgtagtggtctctcctttcagaggaaaaaccagtttatgcagcggcttcacaattattggctgttgaagcggcaggcacggaatggtgtccctcttatccggcgcttgcactcccatctgcagtcccaaagaaacgctgagcagcgagagcaggatgagaagacaagtgcagtgaaggaggagctgaagtattggcagaagctccggcatgacttggagcgggcgcggctgctgattgagctgattcggaagagagagaagctcaaacgagagcaggtcaaagtccagcaggctgccatggagctggagctgatgccattcaatgttctgttgaggacaacactggacctgctgcaggagaaggatcctgcacacatcttcgcagaaccagtcaacttgagtgaggcaaattacctggaattcatatccaagccaatggatttttctactatgaggcggaagctggagtcccacctgtaccgcaccttggaggagtttgaggaggactttaaccttatagttaccaactgcatgaagtataatgctaaagacacaattttccaccgagcagctgtccgcctgcgggacctgggaggggccatcctacggcacgcccggcggcaggcagagaacatcggctatgaccccgagaggggcactcacctgcccgagtcacccaaattggaagacttttaccgcttctcctgggaagacgtggacaacatcctcatcccagagaaccgggcccatttgtccccagaggtgcagctgaaggagctgctggagaaactggacctggtgagcgccatgcggtccagtggggcccgcacccgtcgtgtccgcctgctacgccgggagatcaatgcccttcggcagaagctggcacagccaccaccaccacagccaccatcactcaacaagacagtatccaatggggagctgccagcagggccccagggggatgcagctgtgctggagcaggccttgcaggaggagccagaagacgatggggacagagatgactccaaactgcctcctccgccaaccctggagcccactgggcctgcaccttccttgtctgagcaagaatcccccccggagccccctactctgaaacccattaatgatagcaaacctccaagcaggttcctaaagcccagaaaggtggaagaagatgagctcttggaaaaatcaccactgcagctagggaatgagcctttgcaacgcttgctcagtgacaatggcatcaacagactatccctcatggcccctgacaccccggccggtaccccacttagtggtgtgggtcgccgcacatcagtcctcttcaagaaggccaagaatggggttaagctacagagaagcccagacagggtcctggagaatggcgaggaccatggtgtggcaggctctcctgcctctccagccagcatcgaggaagagcgccactcccggaagcggccaaggagcaggagctgtagtgagagcgaaggggagaggtccccccagcaggaggaagagacaggcatgaccaacggctttggaaaacacaccgaaagcgggtctgactctgaatgtagtttgggtctcagtggtggactggcatttgaagcttgcagtggtctgacgccccccaaacgcagccgtgggaagccagccctgtctcgagtgcccttcctggaaggtgtgaacggagactctgactacaatggctcaggcagaagcctcctgctgccctttgaagaccgcggagacctggagcccttggagctggtgtgggccaagtgccgaggctacccctcctaccctgccttgatcatcgatcccaagatgccccgggagggcctcctgcacaatggcgttcccatccctgtccccccgctggacgtgctgaagctgggagagcagaaacaggcagaggctggagagaagctcttccttgtcctcttctttgacaacaagcgcacctggcagtggcttccaagggacaaagtcctgcccttgggtgtggaagacaccgtggacaagctcaagatgctggaaggccgcaagaccagcatccgcaagtcagtgcaggtggcctatgaccgtgcgatgatccacctgagcagagtccgggggccccactccttcgtcacttccagctacctgtaagggcagggctgggcctgcatccgcttgccctgcctccatcccgcagggcacagagaagcctcttctgcccctgccagatgtatggccggcagcttccccctctcatggtaggccagggactgggctttctccccactaagggcaaggccccagttttgaccaatcgcatggttctcctggcaggcctgctctgtgccaaaaactcccacccaaggtccctcaggggatatttcactgaagaaccagttagaagtagaaacagctgtggggcttgggcccagcttaggagattgcccagatggcaagaggtcctgggctccttcttgaggggctgcctggcccgctccatcctactcccactaactacacctcagggcgggtgaggttccgacactgatcccagagatgccgtggatacgccagggtcccagggggaatctccccaagctcacactctctcccgcttatcgcctattctcacacctcttctcggtcccatcttctgcacccattgcccagtcttgctttctctttcccatattccttttctttttctcttgtgccaaactgacagaaaccgtcaccacactggtctttttctttaatgtctcattccccttgaggccagctgctatgccaggtggtgtctctgccaggctcctcaggcccagacagaggccagcccacaacctatgaccccctcccccaggacaccacctcccacccacagaccttccctttagctgttgacacaacttcccagctctgcaagtgtgccccctggatcaaggcgggtcccctcttgtttttttctttgctgccacgaggtggtccaagccttcagggtgggctcctatcaggctgggtgtgcgagtgtccatctgtccacatggatgtcgagggtggtttgtgtggagctgtgctcgtcagctgggtctgccctcttcccccttttctccttcttctctcctcatggactttttctgcaattgcagtcttaagcttcactctccaccacctggatggcatggcgcctgccaccaaacatcttcctggcctgcgctctgccctgccctgcctagcctctgctactcccacttcccaactccagggaatgcattacttttatttcaaaccctctgcctccttccttctttctcttcaaccccctccccaccttcaccttctcaaaaatggaaggaaaaaaaaactgtgaatggggaatgctgactgacaaaccaacacaactttcagaggcttcagtgtctgttctctggacatttcttttcacctcctgagcaccaaagtcgcagggccagttgcaggccgctgattgccatgttgatttttaacctgatattctttttaattgttttaaatttttcataggggagttttggacaaaacagtcactggggagatcactgccatttttacacacttgactttttaaaaatacaaccaaccaaccaccacaacttcttatacatttgggacatgagccagagtttaaaagggaaccaacaaaacactataacttaaaaggatggggttttggattttgtataataataaaaacaatacagcatatggctagggaaggacatggtgtatataattgtaaaatactgttctaaattattcaggcctatagtttccattactggagtcctccattgtgtggccacacagtgtcgttgatttaaaggagccagtgcttcccctctccccaggtagttggtcagctgtggactctgtgacctttgtctaaacctgtgttgtaagatcttgggacttcctctctttctatgtctatctcttccccccaacactttctcttcttagtctctctctttatttttcaatctctgaatattttagtctctctctgagtctcattttttaaaatgctcttttagaacgggaaacggctcagatcctgctgtggcacggggcctatgtgtctctgtcgcgtctgctgtgaagcacatgatgctctatttattgtagagagtgactttatttgctttctagaattgtttataacagatggtataagagaggtaataaacagagaaaaatctatgcttgtaaagaatacaaaagttaattttacctactataatatgactgtctgaaacttattttctctctgagaaataaatgttctaatgggcagta

SEQ ID NO: 193 - protein, 1202 aa, Homo sapiens
MRKPRRKSRQNAEGRRSPSPYSLKCSPTRETLTYAQAQRIVEVDIDGRLHRISIYDPLKIITEDELTAQDITECNSNKENSEQPQFPGKSKKPSSKGKKKESCSKHASGTSFHLPQPSFRMVDSGIQPEAPPLPAAYYRYIEKPPEDLDAEVEYDMDEEDLAWLDMVNEKRRVDGHSLVSADTFELLVDRLEKESYLESRSSGAQQSLIDEDAFCCVCLDDECHNSNVILFCDICNLAVHQECYGVPYIPEGQWLCRCCLQSPSRPVDCILCPNKGGAFKQTSDGHWAHVVCAIWIPEVCFANTVFLEPIEGIDNIPPARWKLTCYICKQKGLGAAIQCHKVNCYTAFHVTCAQRAGLFMKIEPMRETSLNGTIFTVRKTAYCEAHSPPGAATARRKGDSPRSISETGDEEGLKEGDGEEEEEEEVEEEEQEAQGGVSGSLKGVPKKSKMSLKQKIKKEPEEAGQDTPSTLPMLAVPQIPSYRLNKICSGLSFQRKNQFMQRLHNYWLLKRQARNGVPLIRRLHSHLQSQRNAEQREQDEKTSAVKEELKYWQKLRHDLERARLLIELIRKREKLKREQVKVQQAAMELELMPFNVLLRTTLDLLQEKDPAHIFAEPVNLSEANYLEFISKPMDFSTMRRKLESHLYRTLEEFEEDFNLIVTNCMKYNAKDTIFHRAAVRLRDLGGAILRHARRQAENIGYDPERGTHLPESPKLEDFYRFSWEDVDNILIPENRAHLSPEVQLKELLEKLDLVSAMRSSGARTRRVRLLRREINALRQKLAQPPPPQPPSLNKTVSNGELPAGPQGDAAVLEQALQEEPEDDGDRDDSKLPPPPTLEPTGPAPSLSEQESPPEPPTLKPINDSKPPSRFLKPRKVEEDELLEKSPLQLGNEPLQRLLSDNGINRLSLMAPDTPAGTPLSGVGRRTSVLFKKAKNGVKLQRSPDRVLENGEDHGVAGSPDASIEEERHSRKRPRSRSCSESEGERSPQQEEETGMTNGFGKHTESGSDSECSLGLSGGLAFEACSGLTPPKRSRGKPALSRVPFLEGVNGDSDYNGSGRSLLLPFEDRGDLEPLELVWAKCRGYPSYPALIIDPKMPREGLLHNGVPIPVPPLDVLKLGEQKQAEAGEKLFLVLFFDNKRTWQWLPRDKVLPLGVEDTVDKLKMLEGRKTSIRKSVQVAYDRAMIHLSRVRGPHSFVTSSYL

SEQ ID NO: 194 - DNA, 4782 bp, Homo sapiens
ctgtcccctcagttcccaggtgccatgaggaagcctcgtcggaagtcccggcagaatgccgagggccggcgttccccgtccccctacagtctcaagtgctcacccacccgggagaccctgacatatgcccaggcccagcggattgtcgaggtagacattgatggacgcctgcatcgtatcagcatctatgacccactcaaaatcattactgaagatgagctaactgcccaggatatcaccgaatgcaatagtaacaaggaaaacagtgaacagcctcagttccctggcaagtccaagaaaccctcatccaagggcaaaaagaaggaatcctgctccaagcatgcatctggtacttccttccacctcccacagcccagcttccgtatggtggactcaggcatccagccagaagcacccccgctgcctgctgcctactaccgctacattgagaagccacctgaagacctggatgcagaggtagagtatgacatggatgaggaggaccttgcctggctggacatggtgaatgaaaaacggcgagtagatgggcacagtttggtgtctgcagatacctttgagctgctggtagaccggcttgagaaagagtcatacttggagagtcgcagcagtggggcccaacagtcactcatcgatgaagacgctttctgctgtgtgtgcctggatgatgaatgtcacaatagcaatgttattctcttctgtgacatctgcaacctggctgtacaccaggagtgctatggcgtcccatacatccctgagggccagtggctatgccgctgctgcctgcagtctccctcccggcctgtggattgcatcctttgccccaataagggtggcgccttcaaacagaccagtgatgggcactgggcccatgtggtgtgtgccatctggatccctgaagtctgctttgctaacaccgtgttcttggaacctattgagggcattgacaatatcccgcctgcccgctggaaactaacctgctatatctgcaagcagaaagggctaggtgcagccatccagtgccataaggtgaactgctacacagcattccatgtgacatgtgcacagcgggctgggctcttcatgaagattgagcccatgcgcgaaaccagcctcaatggcaccatctttacagtgcgcaagactgcctactgtgaggcccactcgccaccattgaacaagatctgtagtggtctctcctttcagaggaaaaaccagtttatgcagcggcttcacaattattggctgttgaagcggcaggcacggaatggtgtccctcttatccggcgcttgcactcccatctgcagtcccaaagaaacgctgagcagcgagagcaggatgagaagacaagtgcagtgaaggaggagctgaagtattggcagaagctccggcatgacttggagcgggcgcggctgctgattgagctgattcggaagagagagaagctcaaacgagagcaggtcaaagtccagcaggctgccatggagctggagctgatgccattcaatgttctgttgaggacaacactggacctgctgcaggagaaggatcctgcacacatcttcgcagaaccagtcaacttgaattacctggaattcatatccaagccaatggatttttctactatgaggcggaagctggagtcccacctgtaccgcaccttggaggagtttgaggaggactttaaccttatagttaccaactgcatgaagtataatgctaaagacacaattttccaccgagcagctgtccgcctgcgggacctgggaggggccatcctacggcacgcccggcggcaggcagagaacatcggctatgaccccgagaggggcactcacctgcccgatggacaacatcctcatcccagagaaccgggcccatttgtccccagaggtgcagctgaaggagctgctggagaaactggacctggtgagcgccatgcggtccagtggggcccgcacccgtcgtgtccgcctgctacgccgggagatcaatgcccttcggcagaagctggcacagccaccaccaccacagccaccatcactcaacaagacagtatccaatggggagctgccagcagggccccagggggatgcagctgtgctggagcaggccttgcaggaggagccagaagacgatggggacagagaagcctcctgctgccctttgaagaccgcggagacctggagcccttggagctggtgtgggccaagtgccgaggctacccctcctaccctgccttgatcatcgatcccaagatgccccgggagggcctcctgcacaatggcgttcccatccctgtccccccgctggacgtgctgaagctgggagagcagaaacaggcagaggctggagagaagctcttccttgtcctcttctttgacaacaagcgcacctggcagtggcttccaagggacaaagtcctgcccttgggtgtggaagacaccgtggacaagctcaagatgctggaaggccgcaagaccagcatccgcaagtcagtgcaggtggcctatgaccgtgcgatgatccacctgagcagagtccgggggccccactccttcgtcacttccagctacctgtaagggcagggctgggcctgcatccgcttgccctgcctccatcccgcagggcacagagaagcctcttctgcccctgccagatgtatggccggcagcttccccctctcatggtaggccagggactgggctttctccccactaagggcaaggccccagttttgaccaatcgcatggttctcctggcaggcctgctctgtgccaaaaactcccacccaaggtccctcaggggatatttcactgaagaaccagttagaagtagaaacagctgtggggcttgggcccagcttaggagattgcccagatggcaagaggtcctgggctccttcttgaggggctgcctggcccgctccatcctactcccactaactacacctcagggcgggtgaggttccgacactgatcccagagatgccgtggatacgccagggtcccagggggaatctccccaagctcacactctctcccgcttatcgcctattctcacacctcttctcggtcccatcttctgcacccattgcccagtcttgctttctctttcccatattccttttctttttctcttgtgccaaactgacagaaaccgtcaccacactggtctttttctttaatgtctcattccccttgaggccagctgctatgccaggtggtgtctctgccaggctcctcaggcccagacagaggccagcccacaacctatgaccccctcccccaggacaccacctcccacccacagaccttccctttagctgttgacacaacttcccagctctgcaagtgtgccccctggatcaaggcgggtcccctcttgtttttttctttgctgccacgaggtggtccaagccttcagggtgggctcctatcaggctgggtgtgcgagtgtccatctgtccacatggatgtcgagggtggtttgtgtggagctgtgctcgtcagctgggtctgccctcttcccccttttctccttcttctctcctcatggactttttctgcaattgcagtcttaagcttcactctccaccacctggatggcatggcgcctgccaccaaacatcttcctggcctgcgctctgccctgccctgcctagcctctgctactcccacttcccaactccagggaatgcattacttttatttcaaaccctctgcctccttccttctttctcttcaaccccctccccaccttcaccttctcaaaaatggaaggaaaaaaaaactgtgaatggggaatgctgactgacaaaccaacacaactttcagaggcttcagtgtctgttctctggacatttcttttcacctcctgagcaccaaagtcgcagggccagttgcaggccgctgattgccatgttgatttttaacctgatattctttttaattgttttaaatttttcataggggagttttggacaaaacagtcactggggagatcactgccatttttacacacttgactttttaaaaatacaaccaaccaaccaccacaacttcttatacatttgggacatgagccagagtttaaaagggaaccaacaaaacactataacttaaaaggatggggttttggattttgtataataataaaaacaatacagcatatggctagggaaggacatggtgtatataattgtaaaatactgttctaaattattcaggcctatagtttccattactggagtcctccattgtgtggccacacagtgtcgttgatttaaaggagccagtgcttcccctctccccaggtagttggtcagctgtggactctgtgacctttgtctaaacctgtgttgtaagatcttgggacttcctctctttctatgtctatctcttccccccaacactttctcttcttagtctctctctttatttttcaatctctgaatattttagtctctctctgagtctcattttttaaaatgctcttttagaacgggaaacggctcagatcctgctgtggcacggggcctatgtgtctctgtcgcgtctgctgtgaagcacatgatgctctatttattgtagagagtgactttatttgctttctagaattgtttataacagatggtataagagaggtaataaacagagaaaaatctatgcttgtaaagaatacaaaagttaattttacctactataatatgactgtctgaaacttattttctctctgagaaataaatgttctaatgggcagta

SEQ ID NO: 195 - protein, 858 aa, Homo sapiens
MRKPRRKSRQNAEGRRSPSPYSLKCSPTRETLTYAQAQRIVEVDIDGRLHRISIYDPLKIITEDELTAQDITECNSNKENSEQPQFPGKSKKPSSKGKKKESCSKHASGTSFHLPQPSFRMVDSGIQPEAPPLPAAYYRYIEKPPEDLDAEVEYDMDEEDLAWLDMVNEKRRVDGHSLVSADTFELLVDRLEKESYLESRSSGAQQSLIDEDAFCCVCLDDECHNSNVILFCDICNLAVHQECYGVPYIPEGQWLCRCCLQSPSRPVDCILCPNKGGAFKQTSDGHWAHVVCAIWIPEVCFANTVFLEPIEGIDNIPPARWKLTCYICKQKGLGAAIQCHKVNCYTAFHVTCAQRAGLFMKIEPMRETSLNGTIFTVRKTAYCEAHSPPLNKICSGLSFQRKNQFMQRLHNYWLLKRQARNGVPLIRRLHSHLQSQRNAEQREQDEKTSAVKEELKYWQKLRHDLERARLLIELIRKREKLKREQVKVQQAAMELELMPFNVLLRTTLDLLQEKDPAHIFAEPVNLNYLEFISKPMDFSTMRRKLESHLYRTLEEFEEDFNLIVTNCMKYNAKDTIFHRAAVRLRDLGGAILRHARRQAENIGYDPERGTHLPDGQHPHPREPGPFVPRGAAEGAAGETGPGERHAVQWGPHPSCPPATPGDQCPSAEAGTATTTTATITQQDSIQWGAASRAPGGCSCAGAGLAGGARRRWGQRSLLLPFEDRGDLEPLELVWAKCRGYPSYPALIIDPKMPREGLLHNGVPIPVPPLDVLKLGEQKQAEAGEKLFLVLFFDNKRTWQWLPRDKVLPLGVEDTVDKLKMLEGRKTSIRKSVQVAYDRAMIHLSRVRGPHSFVTSSYL

SEQ ID NO: 196 - DNA, 52640 bp, Mus musculus
  misc_feature (1)...(52640): n = A,T,C or G
cccatatttgaacagagctatttatcagacctcatatttacgtttttctcagagtaatgtggaatgaagcccctgtacacacatacctcacaaagcctcacctgtgttgaagaattttatagactgactacaacttatggggtttggggtgtgtgtgtgtgtgtgtgtgtgtgtgagagagagagagagagagagagagagagagagagaaagagagagaaagtatatgtgtgcacttgcacatgttggaatgttgcagatccagaggtagatcatcttgggctatctttaatccccttcatggtcatttgtcgcccacctctgtatctgacctggcattccttcaactaacaagtaaaaccatgcatttattcagcagaccagtagctccgccaggtctaaggctaagcatggcatcagatggcacccgagacttacagaagagatagccccgctttcctgtaacccatctatctgatgtccctggcaatgtatttgaaaatgccttcatttagactgccttttgttctgcgactatcaaaagttcatgtaacgtttccacagtgaagccttgtcatcgggagtaacttgaagccatgtgactcacagccgaatcacaatgaaaccatctcttaattccctttggagcaagagacaagttttgccttgatggtagcaactttgtctatttctaacgttcaaattcaagataaataagttgacgggaaaattcttcttggatcccctgagaggaaagggagaatgagtgggacctgggttccaccacaggccaggcggagaaatagactgccgggctaacccttaggtgtgagatatgcaaaaaaaaaaacaaaaacaaaaacaaaaaaaccaaacaaacaagcaaacaaacaaaaaaaaaaaacgtgacagagagcataatggttgtggtggggttcaggtggactgagaggaagtagggggatatgactcaaaggatatagaacagatcacattaagtccgtaaaacgtgtaaaagaatctccgcagctccaggaataataaggaaacctagcaagtctacatggtcatggtagcctacaactactggtattccagtttcgggggatctgatggcctcttccggcctccgtgggcaagagacattcacatggtacacatgcacaaatgcaggtaaaatacccacacacataaatattaagtacagatgtctattaaatattatttaaaattaggcatggtggtaccctactagaatgcacagatttggaaggcaggggcagaaggatcaggagtttaaggtcacactgtactgcctaatgagttcaaagccaacctagctatatgatgaaagcctatgtcatacatatgttcataaatatattaattaattaattaatgtagtcttcatgtattttgttatttattttaattaattcatgcatggtttgtcttaatttattatttattcaattgatttatccatagtttattttattatttatttattatttaaattatatatgcataaaatttatcatatacatatataatttataatagcatcaaaaacgcaannnnnnnnnnnnnnnnnnnnttctaacgttcaaattcaagataaataagttgacgggaaaattcttcttggatccctgagaggaaagggagaatgagtgggacctgggttccaccacaggccaggcggagaaatagactgccggctaacccttaggtgtgagatatgcaaaaaaaaaaaaacaaaaacaaaaacaaaaaaaaacaaacaaacaaacaaaaaaaaaacgtgacagagagcataatggttgtggtggggttcaggtggactgagaggaagtagggggatatgactcaaaggatatagattgtagaatgggcaaattcagagtcaggtgtgagctcacagccacagcgctgcactgcatgctgggaaatgtggaaagccaattccaaagggcacatgttattcctgcagagcatggagcctggttcctagggcccatgttagaagactcacaactgcctgtagctcctgctccagggtccccaatgcctcctcctggcaccctcaaatgtgtgtgcatacaaacacacaaataaaaatttcaattaaaagtaaagaatgtgataatttaagaagtcgtgtgtgtgtgtgtgtgtgtatgcagggcagtgggtgtgggggaataaagggagtaggggaaaacccgcatctgccaaagttccagtgctctgggcagaactgccgcatgctttccacgtggccccaggtgtgtgtctggctgtgtgaagccactaaaccccagctcggtgggtggtggacaaggggcagtcctaggtaccaggttctcagccttggtcatctcatgctggacactgccgaggaagagctaagaacagaatgggggccccaggggcagctctttcagactcggggctgaagggatgagagggcaaggggagatggcggtgggtggtttccacgtgggtgagagtccttggtccagtccatggctggagcacaggaaggccttctggcgggaggttagacacggctcgttatgagaaagcttatccaagcgttcaagcacggctggtcttgatgagcagagacagtctactatggttttagagctttattgtagaaaggtaggggaaaaagagagaacgtagagagagggagaggccggccttggccatgttgctggggaggagggtgtgagaaggagggctagagatgagagtaagagtaaagagtgaggaggggccaagcagctccttttatagtgggctgggctatcaggtaactatggggaggagcatacctggctatagtcagataactgtgggggtggagtctagccagaatgccagaagcttgggacattgtctgcatgactgatagtcacacacctctctgccggaggaggggtgggggtgggaggctgtagctatgtgaagggagccaggtgcccaggatgcatggccaaactcctgccatcccatgaaggcagaaatctccacccactggggctctggggttcaaggcctgttctcgactggagactaggctgtctgtgcacagcccactgccctacaaatatgtatatatgtatatatgtatatctgtgtatatgtatatatacatatgtgtgtgcatatatatttatatacatatatgtgtatatacatatatgtgtgtatatatgtatatatacatagagagggggattaattaaataaattaaataataatattaaaatgtctctacagtagggagcggcatggagaagctatcacattcattcagtgtcttatttgggatcccacatggtacaataaactcagaaagaaagctagagagagagagaaaagaaagaagattggaaggacaaaaggataagccagataaaaagaagaaaatataaaagaaaaagtgaaagagccatggagcaacaagaacatgaagctgaatgtggcagtgcatgcctttaatcccagcacttgggaggcagaggtaggtggatttctgagttcgaggccagcctggtctacagagtgagttccagggctacacagagaaaccctgtctcgaaaaacaaaaacaaacaaacaaaagaaaaaaaaagagcagctgatcaagctaattcacaaacactgatgcagagccccttaaacatatgctattagacattgagtccagtgattggtcgtaaagtgcataagcatacgagtgtgtgctcgtgtgtatgtgtgtgtgtgtgtgtgtgtgtgtgtgtgtgtgtgtgatgactcttaattaagaattaatcttaggaaaccagattggcatagcatcaagaagcccattttgcctgcactggaatagtatggcaaattgtgatataatagaatcccatatagacctaatgtgacaacaacgacttgaaaggaagaggaaagctgctgttacctggagaacagatcacattaagtccgtaaaacgtgtaaaagaatctccgcagctccaggaataataaggaaacctagcaagtctacatggtcacggtagcctacaactactggtattccagtttcgggggatctgatggcctcttccggcctccgtgggcaagagacattcacatggtacacatgcacaaatgcaggtaaaatacccacacacataaatattaagtacagatgtctattaaatattatttaaaattaggcatggtggtaccctactagaatgcacagatttggaaggcaggggcagaaggatcaggagtttaaggtcacactgtactgcctaatgagttcaaagccaacctagctatatgatgaaagcctatgtcatacatatgttcataaatatattaattaattaattaatgtagtcttcatgtattttgttatttattttaattaattcatgcatggtttgtcttaatttattatttattcaattgatttatccatagtttattttattatttatttattatttaaattatatatgcataaaatttatcatatacatatataatttataatagcataaaaatgtaaatgaaggggccagtgggtaaagtgctggttatacaagcctggtaacctgaatttgattcctagaacctactcaaagatggcaggggagaagcaactctgcttatgtgccctctgatctccacataaggccattgcatgcacgacccataggtacacaacagaacatgcacacgcgcacacacacacaaataaaatcctttcctaattaagaaaagaaactgaaaactaccacccagtatcaggagaaattaagcagagaaatataccatattcatggaatcaaagacatactacccttaaaatgtcaattatctcccaagtgatctgcaggttccgtctcacctcacggattgtttctggcaaaagtaattaattagtatattcggttttttgttatctttagcattgcttttatttcttaagatcagttttattgaggcttaattgacaggctgtctaatgtgtccattctaaatactcggtttgtacaaaaaataaaaaataaaaaaagacacctgtgtagacaccgctcagtcaggtccctccgcccacaactccctcccaccctgcctcaggcaaccactgatcagctctttgaagctatatgtctaaatgtcatctaagtaaatccatatggaagtgtgatggagcctgggccccggtgctcagcacagggagtgcttctgttcattcgtgttgtaggaagcagggctgtggtgcttcctgtgggtgggcacaactacccggagcacacaactgctgtgtgtctgttcacaatagttggactattcagagcgtttccagtttgggatgctaatgagtaaagccaccatgggcgttcaaagatggtttttttttgtttttgtttttgtttttgtttttgtttttgttttttttgtgttgttttttttttttttttttttttttttttttgtggaggcacacattttcacttttccctggtagaatctaaaaatcagaattggttgggtcgtaaatgtatgttgacctttataagacattgcgtcagggaatttcccaaagtaattggatgagttacaatcccactaaaagcacgggtatttcaagaggtccctggccttgttgaagcctgaccttattggtccttttgacttgagctccaagtccagcaggtgctatggaactgtgctgtggtcttcttcaacatccctcagtgatggatgagactcggcatctttcatcactgcgcctgtctcttctccatgctttctggttctttcattagctgtaagaatgcatgcacacactgtacattctgggtgtcagaccgagtatgtaggcgggggacattttctcctacgctgtggcttctttttcctttcgtttcctttacaatacttttcaaagagcagatgttttacgactttgacgaagcctgatgtggaagaataaaagatcgtgggtttctcctattatgccccaagaaagttttataagtgaaaacacagcgcgtatttttcttctaggttttctttgacgggtttgatagcatcagactttacattcaagcctgtcatccattttgaattagctccacacgtgccgtgcaatttccccagtattgttactgaagcagcagcccttcctggggagttagagcgcccgattattgacagttgactgacatatatgtgagtcacctgcaccctctgaggtacatatgcggcccgctctttgattttacataaaagagctaagaacggagaacaacctcacggacacaaaatcagcacactctcacaccatagtggtttaaaagggagcacaaaaatgaacaaatcaggcaagagaactcgaaagagccagaggcaaactacatctgtccgtcacacgactgacgatccgctagcatgtgctgatctagtcaacggagaataaacaacctttagcctcacctggaaccattcccaaggtgattgtgtatctgtgatacacaactgtgacagtgtacggtaatgcaccatacactaacccacagagctcaacaggaatgacaactacatacaaacttctagaacaaactgaaggaaaccgtgttcactggcatggataaacagctgcttctcaaacaggatgcagaagatgccaaccagagcttccacagagcgataaaaaaataaaataaaacaaaataaaataaataaaaaacaaacaaacaatcaaaaaacaaaaactagcaagcctctcatcctcttcctgctggagggcagactgtcgcttctgcccacatgtacttcagcaaagaagcagatggaagaatcaggcactgtttagtaggatgttactcaggatggcaatgaactgcaagcaagcaagagcatgggtgaatcccagaaacatcatttggagccaagaatcaagacagggaacgctaaggggttaaagcagttgcctatcatggatggggctctggattcaatccctggcgccacaaaaagaaaagaaagaaaagagatgagacgagacgagacgagacgagacgagaagaagagagaagagaagagaagagaagagaagagaagagaagagaagagaagagaagagaagagnnnnnnnnnnnnnnnnnnnnnnnnnnnnnnnnnnnnnnnnnnnnnnnnnnnnnnnnnnnnnnnnnnnnnnnnnnnnnnnnnnnnnnnnnnnnnnnnnnnnnnnnnnnnnnnnnnnnnnnnnnnnnnnnnnnnnnnnnnnnnnnnnnnnnnnnnnnnnnnnnnnnnnnnnnnnnnnnnnnnnnnnnnnnnnnnnnnnnnnnnnnnnnnnnnnnnnnnnnnnnnnnnnnnnnnnnnnnnnnnnnnnnnnnnnnnnnnnnnnnnnnnnnnnnnnnnnnnnnnnnnnnnnnnnnnnnnnnnnnnnnnnnnnnnnnnnnnnnnnnnnnnnnnnnnnnnnnnnnnnnnnnnnnnnnnnnnnnnnnnnnnnnnnnnnnnnnnnnnnnnnagaatgcttctaaggatttggaaagttctggagcaggttttcctaacctgtattactgacgttggacaagaccgccctttgctgtacagacagtcctgggtcctgtggcatctgtggttgacatccgctagttgccacccctctcagagctttgacaactgcacatgtctcctgacactgccaactgtcctttacaaaggtggctgtagaacttaaatgctgtgggatttacattattgtttcattggttctggaggagagagggagtcgagtcactttacggaaatccctcatgctacatacgtagtgcttaatgtttaaagttctcacttcaaaacaacaacaacagcaggtcaattaaatcttttttttaaaaaagtttttataagcaagcagggagagtacatacagtgaataccagtgttcagtctgtagacacggaggctaaggtccaggatggcgagggtgggtgctcggcagaacccatgagagaagcctgttccagactcctgctccctccttctgctcctccctcccccacactcccaggtcctcctcccaagtgcttcccaagcacacagcagatcccagtgatgaacttcggcccagaccgcattgtggaagccggtgggtttggaagccactgctgtgggtcggcaaggagaattcaagccccgaacattgtgcaaacaggatattcacttgtgtcagagagatcaaaaaaggcttgaggtttttcttcacagcctcagcctgcctccctctcctctctcactttatctagtccttgcagtgagcaggcgcctcttgtacagcaagcaggaagacatggctgcgggggagacacagctctatgccaaggtctccaacaagctcaagggccgcagcaccccctcactcctggatcccctcctggccatgggcttccccacacataccgcgtgagtactgcaactgccacggccctggagcctgactgatagagacacgtgcacattagaagccatgtgggtctctggctgcccacttggtgggggctggggggggggcaaatgttactctcctgcagatcagtgactcttacagtggcatttcaaggtatctgattctgacatgaggctctaaggctaggatctctcgagagaattaccatttgagtttctaagcagcctggggaaagtcacttgtcttttgggaaaatatctggaatatctagtgacaaaatagaatgcatgagaaattccagagacagcttggctcagcaccaccgggctcatccaagtgccctgcgctcagagaggaaagagaagctactgaccatggttagaacatccatcgtaaacctgctgcttagcggtggtcctctcagatccctactcccacggaggcacaagtcggaggtgtacttcagggaacccgggtctcagggagtgagccaaatagcccttcaatgagataataaaaccctggctaccatggaggacatggtattgaagctagtctcttctcctccggacatcagggcttcgtggtcactaaatggggaacagaacccaccaggaagccgatggtcacatgttcaccatccagctgcagatgagaacaccaaggtctaaagagtagcttgtggcaaacctaggtaggacaggagccagttcccaaggcctccgagacccactctgttttactgcttaagccgtagggtggcctcaacttcaaaatccctgttagttaaaccgataaacacctgtgtgtcttcaggctcttcgtcagggctcagaggggctcatgtttctgacctctctgttgtagcctctccaggtggctacatccccattgtccctcgcacaaatagcagtactactgggtggcattacattggattccaatggggaccagctgtatcagccaatgatggttgggtctgtggcccattctggtcttgttgacccaactcagccaaattcaagtcaacatatttacatcccaggccccagagtgagtaagacataccggggccatgaggaaagcaccagtgagcagctggggtggggggacacaggcgagggatgtggatatgtctgcccagtggttgggtaagggatgcttcctgctgagcacctgtcagggcagtacacgctggagccaggaacgcagcctgtctcagccaggtgagcatccacagtagatggattgggttgactttgtcgcagggtagcggggtgcagagagaggaaggcaagagagcagaggtcaggttctaagcaccatgggatttagggtgtggcatgagttattatgagaaagatggagatcttggcataaaggcactcatgggaaggccagggtcttggccctgataggacacagtgtcagtgagcagccatttcactgccagtactcaacccttccaaagaagagacggctgggccttgactgtcccttgttcacgttccacaggctcaaagcactagcggccacagggaggaagacagccgaggcggcagcagactggtaagcgaaaggggagctgtagggttatggggggcttgggtgacttcaccgctgacactctctatcccaggagggtcttctgagtgggatggggtgcctgtggaagtgactcaaaatgacatccatttgcaccagttctgagcccagagaaataacgaaacccacctttaagacattacaagagaatctagagatttttttctcacttgaaaaccagatttaggactctgcacatatcctgcaaacatcctggcttctaccccttgcacataagtgcaagcaagcaagtgcatnnnnnnnnnnnnnnnnnnnncacacacctgatttaatccaaatttgactcagaaaaagattcatgtttgtgatatatgttaaataagcaggaaggtggcatttttgttgctataagatccacttactcacaggctgctgcaatggagaaaaatttaaagagagtcatgaatccccaaggtatcaaagggtacacctggagtggggttaaggaaagctgtccctccttaactcacactccagtcacctgcctggggggtgagattgtggggtgggagaggggtccttgtttttaggagctcctccccagccttggtgtcagttggcgtcatccttccacgcagctgggaagtccctcccgctcttatctgaagaagccacagtgaaagtcgaacaacagtaaaaagcagatcctgggctcggctgtggctcagcagtgtggggagctgggctctctacatgccctacaaaggcaacttaaagaaggaagggcttatctgggagtatttgatgatgcacgtcccatgccgccatcttggtgggaaagccttgtgatgtggctagtgtgtgagacagctggcctcttcatatccacagcgaggaagctgggagaaatgaatgttggtgcctgaagcacactcagaggtgcaggtccctccaaccgtcttcactcagctccctggcctccatttccctgtctgtgggatggcgccactcaatcattcattcaggttgagacttccttcctcagttgacctggcctagactttccctcatggtggagtctggcggtctgttttataagattgattctagggttccatgcccaaccctacctaaactaaacaaatctcttccagcgaatgggctggggttctgtgttctaggagaacctataagactacaggccgagggtgtcaaggcagagggctcacagctagaggctgcacaggcagaggtatggatgtacaggcagagggggcacaggcagagggggcacaggcagaggacgcacaggcagggggagcacaggcagagggggcacaggcagaggacacacagacagaggaggcacaggcagagggagcacaggcagaggacacacagacggagggaacacaggcagagggcacacaggcagagggagctcaggcagaggacacacaggcagagggggcacaggcagaggggacacaggcagaggacacacaggcagaggacacacaggcagagggcacacaggcagagggaacacaggcagaggacacacaggcagaggacacacaggcagagggagctcaggcagaggacacacaggcagaggacacacaggcatagggcacacaggcagagggaacacaggcagagggagcacaggcagaggacacacaggcagagggcacacaggcagagggagctcaggcagaggacacacaggcagaggacacacaggcagaggacacacaggcagagggcacacaggcagagggagctcaggcagaggacacacaggcagagggggcacaggcagagggggcacaggcagagggggcacaaacagaggggacacaggcagagggggcacaggcagaggacgcacaggcaaaggacacacaggcagagggcacacaggcagaggggacaccagcagaggaggcaaagacagatggagcacaggcagaaggagcacaagtagagggagcacaagtaaagggagcacaggcagagggagttccatgtctatgcagagaccttttaaaaaatcagctatccgccgagctcttgaccactgtgccggaagctctggaaacatgaaagtagtcgaaaggtgtggtggtttgaataggaatggcccccacaggctcatgtaggtgaatgtttgacctatagggcgtggcattatcaggaggtgtggccttgcaataggaagtgtgtcattgggggtgggctttgaggtctcagatgctcaccagaccagtggctcaggatctcttcctgctgccattggctccagatgtggacctttccctggtccttctcctgcaccatgtctgcctacatgccaccgcgcttcccaccatgacaataatggactaaacctctgaactgtaagccagccccagtgaaatgctttcctttgtaagagttgctgaggtcatagcgtctcttcacagcaatgcaaacaaaatgtccctggatttggaaatgagtagaggcgatgttccatatgtgtaaggtgggttgtgaggcagccttggtaatcctcactctggcaatgtacctagatatctattctccacatggaagagcccaaaatgcaggtcacggaatggcttgaactaactcatgatttatgcaaacacacatgctcgttcgatctgctgcaaatgcgccattgggatgagctcaggaaagagctatagggggagacaagagatgcaggctcagctctgccgcagagcttacatacaaggtgtatgcctggtgagagcaccccacttcctagcataatgagacatcacaagcaagtgtcggtcaccgagagttctcgaatgagtgtgcgccaagtaagctgactgctgcttagctattgccatacagagattttcccatgtgaatttttttgcctatgcttcttgctcttcttgtcttgaggtagaattattcatttaagacactgagtgctttcctctgcaagtgctggcagattgcactaagcaatggtcgcacagctacaacctgtggccttgctgtactttcgacacaatagagaacaacatcgaagctttgaaataaatgcctatcttaacttgacccataagagaaattgtgtctcttccattttcatttgttttgtgatgaactcgtatttggcgctatacgtcaatctttcttgtatttagagtggttttcttagctgggtgtggtggctcatacctgcagtcccagcagtgaggaggctgagacaaacagaatcacccccaggcccaccaggtgtataaagagatctgtctcaagaaacaaataaatgctgtttttcatcaaaataaataaatactttttgagtcaaaaaaccccactagtattcacttaaatgttgtccaatctttttttttttttttttttttggtttttcaagacagggtttctctatgtagctctggctgtcctggaactcattctgtagaccaggctggcctcgaactcagaaatccacctacctctgcctcccaagtgctgggattaaaggcgtgcaccaaaagattggctgttgtccaatcttttgtgatttaaatttttccatttaatgtgaagtcagtggtgaagttaaaatgtgaaagatcatcactcttctgaaggttgaggtctgggtccctttgtatctggacctttggctacagagccagactgtaatgggactgatatcaagtacatattggtctagcctagagccaacagccccaccactgggtgccatcttgaagggatggccacagcactgatgtttttgtgtgagatcactatagccctaactgtgggttggtgttgccgctgttgcatgtcttcaatggggacacatccgattgatatgacagggttttctgttgcaggctgcatggtcactgcaatgacccttctctggatgaccctatccctcaggagtatgctctcttcctctgccccacgggccccttgctggaaaaactccaagagttctggagagagagcagacggcagtgtgcaaagaacagagcacatgaggtcttccctcacgtgacactctgtgactttttcacggtaagtctactccagaggccttaaatgctcaccacttcagctgatggcagtgttctctggtaacttggcaacaatagaacgcaactgatttattctaatcaagacattagcatgagctatctgctttgtgggatcttttccttccccctcttcaacttcagttcatccttcaggacccaaatcattttagagtcttcagctctccaggcagaagaagataaaatcccaggctctatgcatcttattgtcaatctctctaggagcacatttgggtgatatgaaggtgatatgcccctctaggaaggcagatattacccctggtccttgtccacccagagacttgcaaagtcctaaacagagcaagaaccccctgtgtgatgaaggactaaaggatgctgatttggctggacataaaccagggtcttccctaagttagggcctagccctctgtggaaaaaaaaaatggccaagttagcagcctccctagggagcactgtcaaagaaagaggatgcacagttgttggacaaagagaagagggcctgaggccaaagggaaggacccaccgccatttcttctacacctgtacttgatgagctaaagaaggacctacctactgctgggacatcagggcagagcccgccactccacagtgctaagggaacacaaagcatgatgtgcaagaaagaagtttccagaagccttttccctgagtgcctgagactgggagctctctggggtcaaaactaaaccattgccttctggaggtctgagatgggattccctcagggggcactgtgagcttcctaggagttgactagagaattccagaagctaacatatgcaaagggaaaagaaagaagattgactcaggtggtggggggggggggggagcagtgacaggggacttccaacctaggcatgtaaaggggaactgagcagaagacttggaggtggtggtgacgacgacccttcactccatacctgcaggggctggatagggagaatcccagtgtcgtggacagaggctagtccatagtgattaagccttaactctcaacaggtgaatgaattcaacaagtcctgaggacacccattctttgcttctcttcccttagtgtgaagaccagaaggtggagtgcttgtatgaggctctgagacgtgcaggggacaggatcctgggctccttccccaccctggttcctcttgttctccattcttccatcagctacctcggcttcttcatcaacgacagccccgctgacgccatccgggaattcgccatggcgtttgccacagaggcggcagtcctggcaggtaggcaaccccagctgtgggcagacacactgaaccctttgggtcccagcagagccacatctaaggccttgatggatcagctcctgtgagtcctttaatgaccatctgccgagggatagtttggcttttgtccccagatgggtcctataggtctcaccttaaaaaggggctggggggagttgcagggggtatatctcagttggtagagtgcttgccagggcatgtgatttgacccttagtggtgcatactccagacatgaggtccatacacctgtaatccagaaagcggaggcaggaggatcagaagttcaagagcagccttcactacggagctagtttgagtcctgcctttattacataagaccctgtctcaagaagcaggaagaaagagagagagagagagagagagagagagagagagaaggagagagagagagagagagagagagagagagagaaggagagagagagagagagagagagagaaggaaaggagggaggggaaggagggagagagggagagaaggaagaaagagagaaaaaaaaaaaaaaaccttgaatctgcccattagaaatccccgcccagcgtccctctcccaggttacacaggatcccctcccaccaggaacctcagaatggaaccttacttagcagtgggctctttgaagattcaattaattaagatgaggtcactctggagtaaaatgatcctaaatcaataactggtgattgaaacctaaatcaataacatggtcctgcaaaagacacatggccataacaaagaggccacttgaccacagagacagagatgggcaggatggagccacagccaagggatgcctgaggccaccaggaaggagctggaagacaccagaggacccaaccccagagcctttggaaggaatatggccccgcccacatcttgatttttgagcttctggcctctgcagatctctgagacaataaacgcctgttgttttacaccacccagtttgggtattctgttgcaacaggaagtgtcatgctcacccatcctgatggcctgaaactttgcattatgcctctttgaatactaccaaggcctcacttcctggggaagctggccctgagctcacatccatctcctgaccctgagtgggttcttcctgccttcccaggttaaacctcaatctgacctgagaggctaggagactctcctgagatgacagctcaagagtgtcccaagtccctccctgcccacactgcctctctcggtgaaactgaacccaggtacacagagcaatacaaaaacaaaaacaaaagcctattcaggagtcagcatgactcacccctgggtctctggggaagccaggccaggtcttttcaaggctgtgctcactcacacagggagcacaccctcccgaactactaaaaagtgtcacaaaaaggatttcctacacatacataccttcttgccacctgtactggctgcttccccagcttagggctcagagacctggccagggtccagctggctgctaaatgtcacctagcatcatagtccctcctccttgctttcattaggggaataacacgtcctgtttgcttcctgacctggatgaagagctggcaagcagctcttgggcacagaggaccccatagtcctggaattagcaatctttagtctcaagtcctagctgtggcaaaggaaactaaatcacagcataactctcagccaaggcccctgtggtgacaaggacaaaagagccttgacataggtccacagcaaagtctgtcatttcttcaaagacaccagactgcctctgcagagtctataacgtttgtggtcccgctgacaccagctctgactgttcctgagagactgtcctgtcctctcttgcttaccagcctgaaagactcaaaagccaacctggagctgaggcgttctcaagggcagaggccatcacaactcactgggcttcagtgctatcaggcctccagtgaggaaagtctaatgagcattagacaggctgcaggttttatgtccatcgctcaaggagacccttctttaagcaagaggcattgacggggactggagacatagctcagagggtagagtgtgctcctagcaacagtgaggccctgggttcaatggctagcaacacataaaccaggaatgtagattcacactgatgatcctggcactcgggagacagaggcaggaagtccagaagttcaaagccatcctcagctatgtaacaagttcaaagcagtctaggacacatcagatcctgtctcaaatcaaaaccaaaaaccaaagagcaccaactgagagtctaggccccagtcatgtgtgcaccagagaacgaatggtccattttactgcatttcaagctagcttgcagcctaagagctcggaagaccttgagctatatctctgtgcctgtcctctgtttttggttttgtgtttttcgaaaactgcaagcattcaacctttctcatagtgagagcctggtccttgctttgtcaagaaagcgccaacactaaggagcctgtgcagtagaacagagcatgactaggagaggtttctgcctgttccaggcaggtagcattgacactcagggacaggttctcggcacccctattcccacctgacattcagaatagtacccaacatgttatgttcgcttgacattcgagatgagatactcagcatcctgcatgttcttgactccacagactgtaccatcaagccctgcaccaagcagctgcacctgaccttggcccataagttctaccctcaccatcaaaggaccctggagcagctggccaaagccatccagcccagccactcctgccaatggacagctgccctgtactcccgagacatgcgttttgtgcactaccaggtgagagaacctggcctggatggtaggctggcccagcctttcttactgattggaaatgaataaatgttcccctgacaacactcactcctacaatcttccctgacaaaaagagggggctcccttctgctagagccctctccttatgtgctgtttagaagtagcatccttttatagatgagttgggcacatacaatcatttcaaaagacaatgaaagcgctcccatggtattcagaaagcctgttgccaaggtgtgttaatacatagtctgcttgttaatttataatctataatggttttggtgggcttcatgccaagatttcctttcctaagagctgtgtagttaaggaagaaagtatgtcccacagggaataagcatgagggaggcacagcatcccctgtcataagggaaactataaatagtgtcacaccaagggaggtagatatatgtatttggtcacactgtaaggtctttcctataagagaaacacgtattgggagaaatgataggtagatagattggtaggtgggtaggtgaatggatggatgaatagattaaatgagtagattaatggatggacagatgaatgaatggtggttggatgggtggatggataagtggatagatgaatggagaaatgggtggagaaatgcatgggtagatagataaatgtcttaatgggtggattgataaatgaatgagagggaatggatagatgagtaggtggacagaatgagtggataggtagatgggatggtggatagatgagtaaatgaatggatggataaccagatagataaatgaattagaaatgggtaggtaaatggatgaataagtggatggatgggtggatagattcatacatacacagatagatacataaatagatacatagataatacatagatagctgcatagaatagatacgtacatacacgtacagatacatagatacatagatatacagataggtaggtagatagatagatacatagataggtaggtaggtagatatatagatagatacatacatacgtacatacatgcatagataggtacatagatacatacatagatgggaaaatgagtgtttgagtggatggacggaggaatacatgggtagatggtggtaggtaggcagaagaatagacaaacgtgggtaggcagacaaatgaatgtagacgtgggttggtgagtgagtgggtggatgggtagaaggaagaagatagacgttaaactttccttctaagtccaccctaagatttctaagctgcggcatttggctatgttccacactgcgtatcattaggcaaaggcatgaagggaccttggagacattagacacatcatcagaggagagtgaaggcgagacagactggtatctcctcctggggcttttgcttcacagagaaccctcactaagacgtgggtctcctgcctcctctctagaccctgaaggcgctgttccagtacaaaccccagaatgcagatgagctaatgctcagtgctggtgactacatcttcgtggaccccactcagcaagaagaggccagcgagggctgggccattgggatctcacatcggactggctgccggggcttcttgccagagaactacacggagcgagccaatgaggctgacacctgggttaagcacaggtgagaaccaccctctctctgtctgtcaccacctgaaacagtgggcacagtgcttctcaattctgtcattagaaagacttgcagtccctaccctggccacattacctccctgtccccctcttccccagtgtgcatggcaaacatctgatctattcgtggtttctgctgataaccctcaggaaatcagattgcttcaaattacttgtctgagataataatgctcaaatactgtgaaatatttccatctcatgaacatcacagagtgcacacggaggtcagaactggcccttgtagccttctaaggagggttagcagtttcctattgttctgtaacaaaatgacacaaatttaactgaatgatcctataaggctgtgatcctggcatggcttgcactgcattctcatctgatgcttagggtcctcccctaagcttgtgtggttgttggtaaaatgtatttcctggaagctggcctatgcttggtggtttgtttcttccagctcatttggcggatctctttattttagtatctagcaccatctgggctaagggttttcaaacttttcagaaccaagatgtttgtttcttaaatgtatcggttcctcccctcaatgtatctgtctcctctcccattttactataagcaaaaaggagaaacttggtgaaactttgatactgcacataggattggcatagttgtaaaaagataaagagatatagaatatgtcttatggagtgtggtgaggtgtggggggaggggggtgtttcagcgggcgcatgccaaggcatcccatccccctgaaggatcagtcacatgacgggtatagtatagaatagagtttattcggggcatggagaggggaattaagggggtaatagaggcagagaaaggcagagagagagagtagagaagtagaggccggcatggccatgagcacgtggagagaggggaaagggaagagcccaagagggcaagagagaagcaagagggaagcaagagtaagagagagggaggaggggcaagcagccccttttatactgggccaggcctacctggctgttgccaggtaactgtgaggtggagcttagacagaatgctaacagagataaccagagctacttacccaactccattctttatcggttctgtttcccatgaacaatgttgctaagcattttgctgcaacatggggtcctttcccccacttccatacctctgtcttgatcctatgggcatcctccaacccacaatctatatgtgctctgccgggaataaccatgactggttttttttctgtgtgtgtgtgtgtgtgtgtgtgtgtgtttgtgtgtttgcacttgcataaacattttgtgcatgtgtgttatacatatttgctggacagatctccgtgtattcagggagccccgccccctgccccgcatctctttgtatcacaaggcaaagctttggaaaccatactgttttatttatgcacctactggaagccagttaataagtgtggtaaaagttccagtagctaaaacttctgttttgaataaatcaagaagcaaggtattttgaatatttaaagcaaatgattgatttgggccatttagtggctgacaggatttcatggggaaaaggactttccaagtaattattatttttattaaatggagggtttcctgaaagtatttatgaaaggagatcgggtgacctctaggctactggttcttcctgttaaaattaagcttacatttgggtttgcatgacaggccagggacagcatctgtgcccttggactgtgccactaaatgcagtgacaacaaagtagatcccctaccacccctcccaaggctgccctgggactcactatgttgctatatagccaaggatgaccttttgagcttcgaatcctcctgcctccatctccagagagagcgctggtattacagatctgcgccgtcatgtgggtttcctgtatgctaggcagcagagctaaccatggattcttatatgcacttatgaatctgtcatgtatatatactaacttaaaatagcttttaaactgcatggattcggccagctccgcagcggggctatcccgcatcattttagcttcacgtgctaattcataaaacctgaggagcacacctgcaaacgcaggaaagaaaactcagccggattccagggctttcatatcaggtgtcccctcgtgacccgctaactcacaacaagggcctgtacagagagctacacacaccctcctgtgaaagctgagcccccagcctgggaggtgaagggctgaacaacgtcacaaaatcaaggaagctttggtttcctgcagaatctacatggtcagttagccgctctaaaaaaaaaaaaaaacaaaaaacaaaaacaaaaacaaaaacaaaaacaaaaacaagcagaagaacatagggcagggctggcatcaaactccaggaggctggggaggaggggctattaggccctgtcctccttgtctcccaccaagggcagaagacctcactgtgacagagaagccatcagccaagggacgagcctggactctgcggctactgcaaagcttctgcactaaactctgtctagcaacggttctacttcctgcagtatgtcacctgcacctggacaagtgcccctccttgtgaccctgaccttcctgggagaccagtttctctcaggaaccattgtacattcgtaaaagttgcaagaaaaaggaagttctggatgaatgctggggtgtatgtgatgagcttccacttccccgaccccaatctgacaccccatcccccaccccacacacacacaccaggataactacaagcactgtcccccaaccccaggctaactgtggtgtgacataggctgggaactggcagtaggctgtctatggcctttaaagctgctaaatattcttctaaacatttaaggaggttttaaattggggcatagtggcacccagacttaattccagtacttaggagacagaggcaggcggacctccatgagatccaaggtggccagtgctacacaatgacactgtcttaagggaagtcctggcaaatctgaatgtgtcatgaaagcgttaaacagtggggaatgtagactgacacctatgtgcatagagagttggcctgtggccagactatacgttgtatatacattccatatataactcccaagggcacaggactcacacagggtacgcttgatacaaacagcaagaagcacccagggagagatctgcataccacatgggaagaggccccttcctactcagaggaacctccccagccctgaaggtggctggcactggaacacattgtacttcacagacaacccccaccagcaccagtgtaaactctctagcaggtggctgcaagattctaaggaccctgtggtcccaatccaacaccacccacttgttacttggaaaccacatattactggaagatagctgtgggggacagaccaccgctacctcagtttcagccatcttcacagaacaagtatacagcccggctgcagatcagaaaggccggggctgagaatcagagcccaacagaagctgaagctgtcttccaaccacatgaagacctcccaccacagagctaatcaaatcccacaaatcgagctgtcaggttgaggcttccacacagcaagggcgggccgttgctggatgaactgtgtccctccaaacactcatatgctggagccctgatgaacatttatattagagaaagacctttcaattgaggggtcccttatccaatcttactttgatcagagttcactaaggatacaggggaagacactagcttctcaccaggcctaggacagagtccccaagatgaatcacaagttcctcctgtattgccttgatcttggacctcctacactccgggacagagagacaatgaaacctgttctgtcattgaagctgtgtgacagtaagcccagggcagacactaacacagcgactttgtctttaaatgccacacactgaggtgaatccccttctaggaacagaggtgaatagaaacttcatccacttctatggcatcagttaactgctaagtgacacacctaagtccaagaggaaaaaaaaaaaaaacccgacaaaatgtcacgtgcttccctctgtcccttcgccacccatgtgctcgccaacctcttgcttgcatttttagttgaatgactagcagacaaactcaacttcctctctgactgtaaagttcacagatgtcactcggagataacaatggttttactgtctgggcagtgggccccacgttacacatgtacccctgctttgccctcaggaagacgagagcagcctacacttcctgtgtgagggtgctttagctccatctgctctgcatgacaggtcattgaaagctgctctcagtggctgcagtgtatgtcacagttcagctccaggatccactgacacccgcactctatcccactggcatctgtagcttaagaacgcatgaagtccacgtcttattggtgtgtgcctttaatggccaagccatctctccagcccaggtccacatggaggagcccataagaggttatgaattgaaacaagacacgtcacaatgacagggacagagagccataacttatgggtaatctaaaaatacttgagaccagagaaatggctctgcaattaaaagcgctgactgttcttttagaggaccccagttcaattcccagcacccacagtgtggctcacaaccatctggaagtccagtcccaagggatctgatgccttcttctggcttcaatggctatcagccagaaccacaatgcacagacatacatgtagacaaagctcccatatatgtaaaataaaacatttaaacacatgaactgtatcaaaacgccacaaaggtcacagatggcccagagcgtggtcacaggtgtcaggcagacagctgctgccgagagactcagggcaagtgaggccgagtggctctagacagtctcgggctgggatggtggggaactgttccctgccagaaaggggctgagtaaataaaaacgcacctcatgggtggttgaggagagtgagtcagagagagctgtcaacttcagagtcacttccggttttacgatacttcagacaaaatcctgatgggatcattgctttgaatgccactgagtaaatgaggtatttacctagaagagacatcaggagagaaaagttgggaagacatcggggccaaagtaatgagaggagggatcaacacgcagctcaatgaatggagggctcgcccagtgcatacaaggccctgagtttgatctacagagtcctctaaacctggaatcccacactctttgcctacatagcttaaggcctacctgggatacctcagatcctgtctcaaaaaaaattttttaagaagatattaatggagctgaagagatggctcagtggttaagagcactgactgctctttcagaggtcctgagttcaattcccagcaaccacatggtggctcacaaccatctgtaatgggatccgatgtcctcttctgttgtgtctgaaaacagctacagtgtatgtgtgtgtgtgtatgtatatgnnnnnnnnnnnnnnnnnnnnnnnnnnnnnnnnnnnnnnnnnnnnnnnnnnnnnnnnnnnnnnnnnnnnnnnnnnnnnnnnnnnnnnnnnnnnnnnnnnnnnnnnnnnnnnnnnnnnnnngaagatacttactaatggtataatatatcaaaaattaaaatagggttttgggtcagaggctataaggcagtataaggtaacaaagagatttatctggcatcctgggaaatgcatgtctgagaaccccacagaagctgggggagaagggtgaatgacatccatggtaatttgttccccatacacttgtttacccaagtcagtgcctggcagagacaagaaataaacagaaagaacgtgtctttagacaaacatgcctccggcttcggtgatgggagagctttggtggggccgaagccaagaggtctctcagaacgcttggtaggcccatctttattggtgaccagtcaccgcttggcattcatgacctcggtacattcagaataaccagggcaccccagggcagaacaaggcaaggcctgagctttaatgaggtgagtctgctcctgtgaggggagcctgtctgagcattgcctttgaaaatggcagtgactctgatcccatgtgaccccgagccaaacattcacccaaaactagctcagtggtactgcgggtgtcactagtggagatccaggcttacagtggccaagtcaaatctcacagcctccacatctccttcaagagcaatgtcctgtggctcagctgcaaagtggggagttgagctcgcatctgtgtccgtggtaaagcactggtctaatgtgtgaggcccaggcatgatccataagactgcagagaaaggatgtcagggagaggaggggaagggagagaagaagaagggagagaagcctggtgtggaattctcccatcaccccagcgaggttcacactctgtgaacagcctctgctgttctgctaaccctcaagagagttgagccacccatgcacgcacccatgcacacacacacacacacacacacacacacacacacacacacaaacacacacactccgagtgcctgcctcctctgctcgctcctccatccccacctctatccccaaccacccacaggctgtgtcaatcacagccttgaggaatttgggagagctgcttccatccccagatagccagaagcctactcaaccaggccaccacccctgcattattgcagcccataatactctaccttctgaaacctagctatacaatctgcttccccctcctccccaaaaaagtggaccagagtctaaatatggatggatgcataaattaagttgttaaattcaacagccgacaaaaccatgaccatctttgcattttcagtgggtggtaaccatttcccacatttccagtaatgaatcaaactgttccttgtccataaaggaattggagaataaccttgctagatcaatagatgctcagatatagcaaaggttcttggacatagacggtggcaggcagaacttcgcatggaacacaacccagaagagcccagcgtgtctgtccaggaaccgcatgagtagctgtcactggggctggccattactttttaaacagtttaccaaaacttctccttgtcagaaatggcttcttccctgggaaaatcactcattttctgctctgaggaggagtcatatgctctgtcttggtcattctcccttctctctcgccacccgcctagtccttctggacaggaaggaactctgtatgcaccaaccccttcctgtttcatatcttggggttcgctttccagtttgctgtggctcttcccctacccgtgtgtccccagagttcctgactgcctgttcgcttcctggcactttaagtaatttacagtttcctggttacctgcacgtgctcaggtgccatcagtacccactacccacagaacacatctctagctcttgaggtgtctggtcactattacaatgtcccgactactttcagctgaacacctctgactacagtagatggtaaatcagcagatgatgtgtgaaaaaaatagatttgatatttactaaaggtacacaaccagtaagatatagagatgtagagggtgagatggggaggggatctgttgaagtttgtgattgacagatccaaagtctgaaggtcagcccagcaggtgggcccaggaaagatctggggctatagcttgagtctgaaggtaacctggagacagaatccactcttgctccatggagacctccatctctcctgccttaagactctcacctgaccctgcatgcatgggatcatctaatttattcaaggtttgctggtctcgccgctaatctcatcttaaaggtaccttcttagcagtgctgaaaacatcagaacttggcacagagacacacatccgcagtcccagcgacttggaaggctggggtgggaagctgtcttgagccttgagttctcggctagcctgagcgacaaggaaaacctgccatctctaaaataaagtcacatttgaagaacacctggccacagcagtgaggcaggctttattgtgatgctacaggcttcctgagccatgatctgggcgctctgcaacttggtgttcttttgtggccttgatccttactgcagaggttgaggcaggcattcccaggaacatccatgaccagaaaccatgatgaggccatgtcatgcctctgttcacagtttcttcttcctcccccacaggacgtatacattcaatctagccatggacctgaactctaggaaggattttgaagccagttgcaggggaaatggggaaccccacactccgtcaatgtcaaagagtgttagcagcatacaagctttgcaggtaacaggacccttgtgttgttgttattgtttgtttgtctgtttattgttttgctagtaaaccatgcttgctggtataataccatggtagacttggctgccagagtacggcttttctcccaagtgaaaatattgtagtaactacttaatctcaaatgggagtttctacctcacctttgatcatttggttcccagataaaagacacaaaacttttatatttatactaaggcttaatcagcacaagagctgggcaggtatctatcctctatgctattacatctacttccctgccaataaccctgagttaaaacctgctgtgttaagtctgggctgctcttaactttatctagccagccctcatggccatcttttcaagactcacctaccccatggtgtcgtctcctcttgccacctccttctccctcctggtagtctcctcagactccaagtctagaaactgaaaccctacttatctctcttctgcccagctatgaaatgtcagcatccttattcaactaatagtttttaatgaaggagcaaagtcacatagcattacttgatggacatgaggattctctggtccctaagagcaaacagaccttggggggcagtgtttagcattacaatacatagctacagaccaaacctcaccataaggtgcactcagcaccccccccccaggagcccctcctgaaggttgttgcatttctactaaggaccctggggctactccccaaacacaagcctcccaaggacactgtgggcacatgccctatgactgtgaagcaccaatgacagcctagaaaggaaggaatgttccagagagctgctgcccccaacacacacacacacacacacacacacacacacattgacctgaggctgctggacactgtcaggcaaacgttaaaacaaaataaaatacggcctctgtacctctagatcatggggtattttcccccactgattgaatcaaccagaggtggaaaatgttatagaagactgtatcttgtcttaatcagcttcccaatattgcaacaaagtacctaaaatgatcagctttcaaaaagaaaaaaaaaaaaaggaatggcttgttttgtgtttgtcatggtcttaaagtgttcagtccatcatcatttgatgggttgcctggggcttgttctggtgcagtttactacaatacaagcagacagtagaggagagtcagttacctgatagaagccagaaagcaaaaggaggaaggtgctgggtcccaagagcccttcaaagtcacaagtccagtgacctaccttcttcccaccaggctctcctccgaaagatcccactcttagcagtactatgggctgcaaccaagccttccaataacattcaagattcgaactggctgtggtaacacatatctgtaatcccagcacttgggaggcaaaagcaggaagatagctgtgagtctgagaccaacctgggctacatagaaagttctgggacagcctgggctatagtgtcagaacatgtttcaaataatgaaaacaagaaagaaagaaagaaagaaagaaagaaagaaagaaagaaagaaagaaagaaagaaagaaagagaaggggaaggagagagggggaggaagaaagagagagagagaaagggaggaaaggagagagagaggaaagaagagagaaaggaagaaagaaaggagggagggaaagagaaaagaaagaagaaaagaaggaagggagggagggagggagggnnnnnnnnnnnnnnnnnnnnnnnnnnnnnnnnnnnnnnnnnnnnnnnnnnnnnnnnnnnnnnnnnnnnnnnnnnnnnnnnnnnnnnnnnnnnnnnnnnnnnnnnnnnnnnnnnnnnnnnnnnnnnnnnnnnnggaggggaggggagggcagggcaggcaggcaggcaatagctgtgccagtattgaatgcatacagactttgtctgccactgttccctaagcaatatgacataattcctgttcacattaaatggcattaggcatttctgttgcctggagatgagttagagtccacagggtatgtgtttaccttcagtaaaaaacagcccattgttttatagaagggacttgtacatctgtgaacttcagtgcttgcaggagtccttagcccacttcaggtgcactgagggatgactgtcctactcactaagagcacttgggcaagcagagattgcccagctatgggaaggcagtgaggaagaagtggggaaggggtggggggagcttcttacctgagtgttcagaagcaagacactcacctgggcactgtgaggaagctgcctcgggatggactcaagtatggctaatcctggagggctccttggaagaggaagagtaggagtaactgagtaaactagagataaattgatatatgagagaaaaaaaagaggagagaaaggaaggaaggagagaaggaaggaaggaaggaaggaaggaaagaaagaaagaaaggaaggtaggaggggatggagggaagaagagagatggttatttggttattagatagatagatagatagacagacagacagacagacagacagacagacagacagacagacagacagatgtagggaaccaaatattcaaatacttaagcctatagaggatacttctcattacagccaccatagattgacaggtgatagatgatgatagaaggaaagagacagacagacagacagacacttggaagagacaaaacagttgaaaagtgtctgtgatgggctcaatcctctttccagctcttttatgaagtcacagagcccatgaaattaaacgtagggagaaatgaaagcaatcctccagccttacactgtgacactggcagcctgaccgaccacagttgctgaggagcttgggagaggctccgaccctaggcaatggctggtggatactgcagagtctgcttaataactcacgtcccattgctcccaccccaggctaccatctcgaggagaggcattctggtcatacgtcatggcgagagagtggaccaggtctttgggaagtcttggctacagcagtgtactactgctgatggtaggtggagtccagatgactctagacattattagctctctgtccttgagggaccctagaccatggcatagctcctgctgggagatgccagtgccctcaggctttggggccactaatgtggataaggaaacccacccacatacacactgtccacatgtctaagccaggcccttggcatcaggtcagtgattggtgacaattctggtttccccttttctctaatgagagaggttaaaccacttgtttctggtcacacagctaaggctcaggatttctaacagattgacagatcttagagatcaacatcaaagggaccagggtgtcacacagcccctgttttctggtcctgcattcaagcacctgactgaagagttcccatggcagggcacctccagccagtgtgtactgccccaccggcagcaacacacaagggaggcttcacactgcagccgcttaactgataactactccaaagcttatcctggcgatgcagctttctctcccctgtgaatgataaaggttaaaaggaaaaagcgggctcccggcccctggggtgcaaacctaagcgctctgcagttgagaacgttacaggcctgcaatatttgttctatgcagtcagttcacatcataagaacacttcacaaacgacatccttggcaagcactcagacaatagccttccctgcagagaggatctctgtcttgggggtcttgggtaacgagtggaatttgtctccgtggcctcagatgtctgctacttgtttctacctcaggaaaatactacaggccagacctgaacttcccccgcagcctgccaaggaggagcaacggcatcaaagactttgaaaacgatccaccgctatcatcctgtggaattttccaggccagacttgccggtatgtttcagagtattcccacaggagagtaacactaacaataatgactacattgtatccactgagcccctgctgtgcatcctttgatagtactggcatcttccctactctgccccaccaggaaatggagattgtcttagtaacagttctattgctgtgaagaaacgccaggaccaaggcagcttataaaaggaagcatttaattgggggcttgctttcagtttcggagggtgagtccatgattatcatggcagggagcatgctggcaggcagaccttcaggcatggtgctggaacaacagctgatagcttacctcctgacccataggcagaaggctgagggatactgggcctggcatgagcttttgaaacttcaaagcccatccccagtgacatacctcctccaacaaggccacacccccactccaacaaagccacacccactccaacaagaccataccttctaatccttcccaaacagttccactaattggggaccaaatatttaaatatgtggtggggggggggggcattctcattcaaatcaccacagatgttagatcatttacccagggtcacacagctagtggccaaaagtggagccgtctgatccaggagtgcatgattggtgatgcaagcaaggaaatatagggagggaacactgcagggagaagaaatagcaataaacactatatgcaccaagagtgaattaaaaccaagctggggagatagctcagttggtcaagtatttgcccagtgagcacatgggcctgggtttgatcctcagaacctacgtggaaaagccgggtgtggtggtatgcacttgtattcccagtgctgaggaagcagaggcagggtgctccccagggctccctggccagacaggctcgcctacaaggttaactccaggcccgtgagaaatgccattttaaatataagggtgaccggcattcttgataatgactgctgaggctgatctctgacctccacacacaagcatacatgcacacccgtatgtgtgcacacatgcacatgcacacacacagatacagtcacagatgcagacacacacagttacagacacacatgcacagacacacacacactttaaaagcacacacacacacccttacaggtaatattgcactacgactcatgcccttaagtttatgactggggtgtcttcttctgtgacatctaagagattgtgatgtttctctggttacatcatacaaattcggaaagctgagcctaagggggcaagcagacatcccagtccctggctgcttagctacaggaacccactagaattagctttcttgcttctcaccctgcgtgagccacaggcgctcactgccagctctcagggtgggaggctgggttcacactgtgactgtttcaggctcccagtcagacaacagttagttctggggttgggataccccaactgtacacagcccatttgggctcctccttccctaggagacatgacatgctcatatgtcatgtgagcctgtatgtgtgtcccagaagtcctgtcctcatgcccaaatacttacaaaggtgtttgaacagctcttggtgtatatacatgggagcatccggggatgtgttgcgtaggtaacaagtatccctagctactatatccctgccaccatttggtggcagaaattgaaatcccaagatcatggttcaagcagatagttccttctgaggctatgaggaagacttatctctccctattgctcaatggggtcttgccctgatatcttcacatcattcctttctgtctgtctctctactcagccttctcctttgcagaagacatgttggtacagaacgcagccttatgttaacttgttctcagttaccccatgggatgctgggggataggtggcaggatcctttgtgggcacagaatcccacacatatacgtatatatgcatgtgtatacatatatacatatgcatgtatatatgtatgtgtgtatatatatacatatatacatatatacgtatatacatatatacgtatatacgtatacacacacatatatatatgtatatatgtatatacatatatacaatatgcatatatgcatatatgcatatgtgcatatatacatatatacatatatacatatatacatatatacatatatacatatatgcatatatacatatatacatatacacatacatacatacatacatacatacatatcccatacattttgcatgaaatctgtgtgtttggtacagtcacaactttctgatattttttattcctattggtcaaagcctttgacacagatccattgattaaggtcccagtctatggatgtcagtattccaacttgcccataactgacaaccccaagcctcttgtcagaaatctcttgtgccatggggtttcctttgccaccagctaggcttctagtattacagagaagacatggttggattacagcttgtccttccacaagccaagatctgaccaacttaatggctgcaaaggtatagagctatgtgcaccttaagcttacagtgcaggtgtgacttgagtggagcatggcgggttttcagcccacagagtcacttttatctggtgcccaggcctccttccagactcacccaggctatgggcggagctcaggtcctcagggatgcagggctggggtctcccctggctgctattggtactttccacttctgaggctacacccatgtctggtaacgtgggacgctccatctttcaacacagctaaaggatatggttcacatgccaagtacgaccacattcaatgtctgctcgtttctgctctgtggccagctgggaggaacctgcactgcttacagcctcaacaacccctgtaccaccacctccaccatacaatataatgtagttacagaccattgatggtcacagttgcaggttctaccctaacctggttggggaccctgcaggtgtttacagcagtgggtaagagtctcatctatccctgcctgctaccaaggcaagtgcccatcctgggttgatgcatgaagggagctccctacctgttgtttcctaggagaagccctgctggacagcggcgtcagagtcaccgcggtcttcgcgtctccagccctgcgctgcgtgcagacagccaagcacatcctagaaggtaagaaactcagcaggccttgcctttggcttgatcttgaggatgttctccatggggagcaatgagggtgtggccacaactaagccaaaagacagttagaagccagccttctaggtgctgctggcagaaatatcccattaatatcccaaagtgctagggttgtacgactggtgtcacagggtcaacatctgtaatcatactttgccaagtggctcagctctgccaagtgtctcggtacttgggaatgaacattcacaagcctagagacctggagctactgagaacccttctagatccacaggtgacttcccagggcagggtcagcactggaggggagctgtccagcatctctcaactgtcaggaaaccattcacagatcctctcagccagtgagacaacattgccatgtgggtggctggtggtcaccaaggttctgcccccacttaggaagtgtccatatcaggagatagaaaccttctttgttcactgcagaacaaagttcctgaacaaagtcagcaccctgcctgccaccagggggcagaggccctgcccctagtctgaacccctcttgcttcatcccaagcacagagagccttacttgaccaggtctttttggtcaagatagaaagtgcttgggaggggtgaactgtgagaaatcagaatgttccagaagtttcctcccctactcttcacccccttgggactccctgtctccgtcactgtatcattccatcaaggatgaaactgcggcgtggattaagtgagctgtatatgtggttatagtgagaccccagggtgagcccactgcctacggtatccccatagccaagcatcatggcccctcttgatgggcagcatgctgtcagcccttggatccctccaaatgcctggtggtccgggtcttagagaaagcactgcttcacttggatcacaggatgatgtttgccagccaagagtcacacatgtgacatgtttccttggactcagttatgggttggtgttctggttcgcttttccattcctgtgataaaacactaaccaaaaccaaccggggaaggaagaggcatacttgacttacacttccacatcactgtccatcaatcggatcggtagtggtaggaactcaaagcgggaaccggaagcaggagctgaagccatggaggggtgctgcttatagccttgctccccgtggcttactcagcctgccttcttatagcacctaggattgcacgcccaggtgtgacaccacccacggtggttttggccctcccacatcagcaattaatcaaggatatggatgtaataatgtatgcctttaatcgcagtacttgggatgcagaggtgggcagatctccgtgagttcaaggactctgcatagtgaattccaggacagctagagacttgcctacagaccagtcttctcagttgagattccttcttcccatcatgactccagcttgtgtcaagttgacaaaaaacactaattaccaaggcggatataggatgaaggagtttctctaggtttgttgtatccaaatgcttgtttccattgacccaagaactcaaactggagaagaagctgaagataagagttgagcctggaatcttcgagtggatgaagtgggaagccagcaaggccacactgaccttcttgaccttggaggagctgaaagaagcaaacttcaatgttgaccttgattataggtatgtaccttgcaaatctctgccacccagagatttcttctgttaaagaagatctatctactgaggtagaaccatgcagtggagagtaaggtagattgagctgtgtatatagtaccagcaggatcggggcaatgagaagttgagggttatggtcttgctcagccaacccaaaactcctggcgaaggcagctacagtgaacacacaccacctagagatgagggaggctgggaaacctgaccacgcatggaagatgggggtattcctgataaagctgaccctgcacggatggacacagagggacctcacccagaagagggtcctgactctggtttgggatggggagtggctttgttcttcccctggggtgactatctccaggtagagtgagatgtacagctttcctgctgttcattcaacctccatgctggtggtgccacagccctttgccagtgtgagcacatccaggagcccctgctggctgtaaacccacgagccctgcctggcaggctctttagaggatcatggtcccactcagctactccagcatacccttgttcaccaggaggctccagaacagcagcccatgtctctttctatcttctttcaggccagcattgccccgctgctccctcatgccagctgagagctatgaccagtacgtggagagatgtgccgtgagcatggggcagatcatcaacacatgcccacaggacagtgagtgtcccgcaggcttgaggagggcagcctcaggcttccctgggatgggattggctgattctggcctgttagcgtctctacctcttcactcccatattctggccaagacagtacatcatctccaccatgacagggagtggatgcatatacacatactccatgtagcccatcttagttagggttttactgctgtgaagagacaccatgaccaagtcaactcttataaaggacaacattgaactgggtttcgaggttcagaccattatcatcaaggcaggaacatggtagtatccaggcaggcatggtacaggaggacctaagagttctacatcttcatctgaaggctgctaggagaagactgacttccaggcagctaggatgagggtctttaagctcatgcccacactgacatacctactccaacaaggccacacccattccaactaggccacacccactccaactaggccacgtctcctaatagtgccactccctgggtcaagcatatgcaaacaaactatctggtgctgagcatggatggccctagaacatcagggtcttcaccaactatgggaacaagagaagcccagaatgacagaaggatcaggtagccaatgcctaaggaaaaggaggctgagccatagcccttccaccctaaccaccagccacgctcccagctctcctggctccacaccatcaaccgctgcctctcccagcttcactttgtccagtgtgagacacacaccgaggtgctggatcccatcatgtcatctgaggtggctccccaagtcccactaacccttatctaaagcaggcagcatctcaggctcacagtgataagccagataaagtgattggctcgggtctggatagcagccatcacacacccacctgtggctgacaggacctaggcagccagccacaagaggatagaggctcagatcatccgtataccatccttgaagctggcacacagacaccacaccctagccctaggccccacatcacaaggtggtgtgctctaaatcatggcaaaagactgggtcttcctacccttgctacttcccacccaccacctcataggggcacggtagctggacccataagacattgaagaggcttatatgttgcaaagtgctctctgggcctgctctgaccttgaggtgttttgtctacagtgggcattacactcatcgtgagccacagctcagcgctcgactcctgcacaaggccactcctcgggctcccacccagagaatgtggggatttcgcccaactggtaagaaaggtatgtgaccctcttatacctctttaacctccaagtgaagcaagcgctgggtcatgcactctttatagaatgacaagcatccatcaaatccagggctggctatgtgaatgtgcctacctgctctcatggagggcatacctgcaggagctgtgggtaaacctgtcaccctaacacctgagtggcagtctccccggttctttgcaggcagcaatgtcaagaagtttcagagctagcccatagcccatctcctgtggctctaagagtataagggtcctgtgaagagtcaggagtcactgtttgagtaagagaaggctagaccctgtgtggtcctgccttcctcagtggggcctgggagcggtactgacagatagaaggaacttccacctactcaccttctgagtcatctgtcaaaggacaaatgggaactcactgtagctatttgtagcatgaccaggtgctgggccagtctcatgaaagactccaatgacaaactggtgacaaacatgctttggtggcactttgagtgacctattgaatatactccagcagatcagagagggaggtggccagaccatgaattattcatcttagactagctcttttcccctggtgaccagttctgtctctcttcctcatcaagataattaaccagtgatcctgtaccctgactctattggtatagaaaattactgataagagctaggcatgatggagcatgcttgctgtaattgcagctactcggcaggctgaggcaggctgacctcatgagcttatgagttacgggttctctaagcaacatagggaacctcagttgaaggagaaaggaggtaagagagaaggaaaagggaagaggaggaggaggaggaagatgagaacaaggacaagagaaaaaatgattcctataaattctaaactctagaactttcttatgctgaccacttaagagtctacatcaaccccattccaaattagacagcccagatcagaagtttatccaagggctctgctgacagatgattgaaaggactggtccttctaatcaggaccagcatgcaggaccctgagtattcaaggctttccactgactagcccattacaccctcctggcagtccctgtctgcagataggatgattcttttccccctgagtcagtggtagcatctgcttagattcctccctgcatcttgggatgtttgcaaattttgtctaaccaaagaattcctagacgttaaaaagagggtgaggcagtactgttaagaaaggcatgtggggggctggtgagatggctcaggggttaagagcaccaactgctcttccaaaggtcctgagttcaaatcccagcaaccacatggtggctcagaaccatctgtaacaaaatcggatgcctcttctggagtgtctgaagacagctacagtgtacttacatataataaataaatattttaaaaaaaggcatgtggacagagaagcctcaacacaaggatccaatgggctggtccattttacagatgaaggcacagaggtccaacgtttcaccttgtgctttgtcctatagtctaaacccacaatcctgaacctttctgtgttgctgaggcacaggtaagatagcttatagccagttgtcagggtctctcaccctcccaccctcgtagatatgtgggcctggtaattctgtgggaaaggaagactgacccatggctcccagaatgcttagcagtcccactccaagttgtaacgaatctctaggtaacaatgtaacccattgtcgggagcattgatcatccccaggcgaaattaaatggtaagtgctggcattggttccatggctccctggcagcctgggaccattgggtcccctccacgactgggaggcacattttcagtgggtttaagaaatgctccaacgttgattgacttgtaacagaatattataaacatactaaaccctcttccagattccatctctgggcatgtgcttctgtgaggaaaacagagaggacggaaagtgggacctggtgaatccgccagtaaagacgctgacacatggggccaactcggtctttaactggagaaactggatctcaagcaactgaggcagcccgagctttccaggaagaggtgactgccctatgccaaggcacaaggggctgtgataatggttacaaaggcatccaatgattacaaagttatcctagcctctcgcccagtgtgactggaggaaagaacaaaacacactcgatactcagggggaatagccatggctcagaccttcgtcactgccacccatggatctgctgtcctgccagcctctgcagaggccagagcagaggtctggattaggataccacattgcaacatgtgcactggtttggagagaacagaggaactgcctcacttccaggaactacagactccccgcacttgaagatgccacccatctattttgtatgttcttaggagccctccttattactataaccatcgctctttaggcagggccataccagctgaaaagggagcaatggtcaatgaaaaaagtggccagcccaccagatcaaaaccaggacagcagctggcaccagcactttaggggttccttgctgttgctcggacacagagttggagacagtagtgcttgaaagccatgcaaaattcctaacgcacagagacaaaatgtgtgattctggaggttagcggggtctgtgttcctctacagattctagaggactcttccccagccattccagaatccagaggcctctgtccttcctggcatcctatttattatattatattcctggcatctactaccttatgattctattcaaatcaatcagtttggggaaattctaaggcacggtcacatagcccctgccttgagcctcctgtctcaaagacgccatgacaaattgtgctcagtagcctaggatcttctctcatcttaagatccttggcaactaagcctgcaaagtcccttagccacaggggtcacttgttcatggtcccggaagttaggatgtgtcttagaaggccatcctccagcctacctcagcctctgttcttccaagcacattatggccgttgtaccagggtctagacataaagatctgtgcctcctacacacacttcgctcaggtcgttttctggctcctccttttctctcttctcaatgagcaggaagggatgggggctttgtgagtggaaggagggagccccttgccttaataggaaggggtggcagcactgtcacagcggggaaggccgttcctaagacctggactgagagaatgtgtaagcactgtatgtaaactcagcacgagctctggcttgggaacctctgatccagtggtaagtgggattctctgcatagtgtccttccacctcaccctacagaggccatcctgtccccaagtggccgacactgcacaagtgaattacactcagtcatccccacaccatgcttaaaaagtgggtgggggggtgttcttctttcccagcccccttttgcaaaattgtggttactttttacaaatttgtgctctgggctgcagcccaaggcaggaaggacctggaaagcaggagggaggaggtgagggaaggggtaaggaagggagggagggagaaattagggtagggagtcttgggggggggggcttatgtttctgagctcgtctgacccctgctggtgacatttggaaggacaccttcctctgggcactgccctggcccacctcccaacccacagtctttgatcttttcacttgagtttttaaagtaagattttgattgacacatgtcctgggcagagctacattctttcttctcaagttcaaccagtagacagttctgcagggttcagaggtggaaacaaagacaaatgatcctattggtggatgggccaaaagctcaaggcactcttccaccccaccctagaacctggggaagtctgggaagagacttgggggctgagccacctgaaaagctatttgagagtcaccactgtgggctgaatcagttcatcggtcacacagaagtcttgatcccagtactccagtgtgagactgtatttggagataggattgtttaaaaaaaagaagaagaagaagaagtgcatgtgagacacacatagacagagagaaagagaaagagagacagagagaaagagagagacagacagacagaatatatgtaagcactctatgtgtgcaggctacagggaataagtggttgtcagacactacctacctttacatagtgtcttagctacatttctattcttgtgacaaaacatgataactaaggcagttttgaaagcatttaattgggcatgcagcttcagagggctagagtccatgatggtagagcggaggcatcacaacagggatagttgagagttcacatcttgatccacccaccatgacacacctcttcaatctcctaggccctcccaaactcctaggtccaccaactgcggaccaagtgttcaaacatatgagcctaccagggttggagaaagggatgtggcattctcattcaaaccactacatttagtgtggtggtttgaatatgcttggcccagggaggtgcactattaggaggtgtggccttgttgaaggaagtgtatcactgtgctggtaagaaatgagaccctctccccagccacgtgggacccagtcttctcctagctgcttttgaaacaagaagtagaactctcagcaactccagcaccatatctgcctagacattgccatgatccgaccttgataatagattgaatctctgaacctgtaaaccagccccaattaaatgttgtctcttataagagttgccatggtcatggtatctcttcacagcaataagaccctaactaaggtgcttaggttttggatgctgaagtcaggaggccagccttgagcaccaagcatctttatcttctgagccatctttgttggcctggagtcaggaccttgaaaaaaggtacctggagccagcgtggtagtgcacacctttaatcccagcactcaggaggcagaggcaggcagatttctgagctcgaggccagcctggtctacaaagtaagttccaggacagccagggctacacagagaaaccctgtctcaaaaaaaccaaaaaagggtcctcatagcttcatatatttgaaagcttggtcatctgggaccggagggattaggaggtgtggcctggttggagtaggtgtgaccctgtgtatgggctttaggctttcagaagctgaagccaggcccagtggctttctctcttcctactgccttcagatccagaggtagaatgctccagcaccatgtctgccgtgtgtcaccatgcttcctgccttgaggataacagactaaactctgcaactgtaagcaagtcccaattgaatgctttcttttttaaaaagctgccatgatcatggtgtcccctttacagcaatagaacactgactgagacacacataccgagaagcaagcctgtgacgacatatcagaagacaccttctgggctggtgagatggctcagtgggtaagagcaccgactgctcttccgaaggtctgaagttcaaatcccagcaaccacatggtggctcacaaccaccgtaatgagatctaatgccctcttctggtgcgtctgaagacagctacagtgtacatataataaataaataaatcttaaaaaaaaaaaaagaagacaccttctacaagtcaaggagagagggctcaggaggaagcaggctgggtggtacctccatggagaatttcctttgaatcaagcatctagtccatgtacattgtatgtcagtgcatgcaagagcactcaaagtctcccacccaggagttgaacactaggcaggctatacagctccatatgaagtgccaatggccagacctgtctacatatcgtgcatacgatctgcactgcatggaggatacacgccaggtgtaagcaaagatgacttcattctttgtaaaggttttgtgcatcctaagatctcggtttgtacaaggatccagaagccaatccacagggaacaccagggaaccattactgagggtacagaacagacactggagtcagggaaacttggagggctcccgactggagcaaaggttattctgagaacaggaagtggttgtatctgaccaaatggtcttctacgatcactaagaatagacctgtcaacgtcagatatctctgagtcaagctcagaggcccagagcctggccctcaccacactctgtgggctgttgagtggtgatcagcccacccagggatggaactgtcttctccagctgcagtaacagttccgttacccttcatggggcagctggattacccagagctttctagaatgcctcgtagccccatggacaggtgtgccaagtctagcatgactaaccaaatgccagttcacagcatcaactccctggagggagaaggctatcactacctgggatttgagaaaattgactaaaatagattttctatatcctgaaatgcaagaaaatcatattaacaaaaatgtaaaatagcaattttgttggagtcagaaattcagggtatttaaaaaaaagaaagaaagaaagaaagaaaaaataagagacattcagaaatgactcctgaaaagacacagagtccaagaatggtttttgtgaactctggtttcctggaggaatataatgaaacgaaatgaaaatgtcatgaaggaacccattatattggagactgaaagtaaaaaaaaaaaaaaaagaaaaaagaaaagaaaagaaaagaaaagaaaagaatattaggtaaaatcaggtcccacattcaaggcatggggctgtcttcccactgtgaataattggaacctagccccaaaacacgggcaaattactgagatggacaacagtcaatggaagatggcagcttctgaagatgcaaggccctgaaatccacaggcacacctcatgctattacaggtccactctgccgtaaagcaaatgctgcaataaagtgaaccccataaaatctctggtctcccggtgagcatacaagttacaccacactgctctctgataagtatgtgatagggaaatgttttaaaatacaatgtatagaccttaatttaaaatattgctgaagccgggcagtggtggcacacacctttaatcccagcactcgggaggcagaggcaggcggatttctgagtttgaggccagtctggtctacagagtgagttccaggccagccagggctacacagagaaaccctgtctcgaaaaacaaacgagcatatatatgtattttgtgtgtgtgtgtgtgtatatatatatatatatatatatatatatatatatatatctgaaaaggaaaccggtaacaaccatcatagctattgggaaaatggtgtgagtagatttcaatggatttgcctgttgtaagattgccacaaactgagaaaaaaagaaagaaagaaaaagccataaagaaaaacccacatcaatgttctgcagaaagggataaagcaaagaaaatgaggtatgttccttgctgtagttaggaacacagacacattgtggtggttcgaataaaaaacggtcctcatagcttcatatatttgaacgcttggttatctgggaccagcactactggagatggattaggaggtgtggcctggttggagtaggtgtgacctactgttgctgtgagaaaacactctaacccttggtgttttggattcagaaatatttgtccaaatcccactctgttctcacgtctctgcccttgttcagatactaaacattttttagatcctcacattccacaccaatgtccctccattcttctgtgatctagtaatgcaagccattactctgccacacattctggaaggtttgaacctacatccctacaggctgtgtgtattgaacacttggcccccagctggtggtctggtagctccgcctccaggaggggggggggacgctattggacttacacttccgggtcacagcccatcactgagggaagtcagggctggaactggaggcagaaacctggaagaatgcggcttgctgactggctctttctcaggctcgtacttactcagctttctgatacagcccaggatacagcagctgcctgcagtggtaccagtcacagtgggctggaccctcttacatcagatacaaatcaagacagtctccacccaagacacacccacaggccaacctgattattgggagtttgttttgtgcttaggtgggaatttgcacatccgctgaaggtccctgccaactgttggttttttgccgggtcattgaagagccagcggccaatggctgggaaaggggagagaggcgggactttttggattcgcaggcaagaaatgctaaggaaagaagggaaagaatgaccaggattgggaagcagagcgatcagactaaagagcccactaacaggtaagactccaggtaagtggcctcacactcccccgattgggtctaggggagcagagatgaaatatagatttggcaagtataactcaggaatattggaggggaaagtgggttagccatgtggagttagggaggagccctgttgcactgttaaggcatgataaaaattaagctggcatgactttcatttgtgaatccagagctctatggagggtgcagagctgggagcatcgagtggcctataaatatttaccgcaacaccagatgacatcaactactcaactaagacaccttcttcaggtgattctgggctgtgtcaagttgacagttaatgctgagcagggcatcgtgcatggtcttaaagaaatggacaagaggcaacaatagaaacttaaaccctgaaactacctgtaggaaaatctgcagttatttatcatgggttttaatatctctctctcagtagttactaaaaacagaaagaaagaaagaaagaaagaaagaaagaaagaaagaaagaaagaaagaaagaaagaaagaaagaaaggaaggaaggaaggaaggaaggaaggaaggaaggaaggaaggaaggaaaaagatcaataaatacataaaagaccccaccgcactaccaatcaacttgacttaatcaatatttatggaacagctcaccacacagtggtatataatttattttcttttccagtacagtatggctctatttgccaaaaggaccacattctaggctagaaagcaaattgtaataaatgtaaaagtatttgagtcatgacatatacattttctctccataaatgaaaaagattagaaaagatgacagactacctaaaaagaaaatccacatatttgtaaactaataatgtacctggatcagagacaaaagccaaaacaggcaaaatgggacaggcaggacgcatctgccatgtgtaccaaaaagcctaaaaacctgagtttgatcctcggaacccacctggtggaaggagagaaccaactccctcccacaagttgtcctctgacctccgagtgcatgccatggtgtgcaagcacacacatttgcacacatacacacatgtctgtgcctcggactactcgcctcctgaccctacctgcccttgggggttggaggtgacgtggtgcagagtcaatgacacagattccgggagcaggtgagaaacacagcagcaagctctctgaacactgctgcaagctcctttaaaaccctccatccaagtccccattggccccaagaaagcatctcttctaaacaacagttcctgattggctggcattgtctgcaccagcaatccttgctctctcaggcagtcctcccttagatcctcctgtaggagatgcttttgtagctgtgcagcccccagcgtttatatagaggtgacctcgccatgcctgctacaacacaccataattttttaatctgagaaaaattttgaactttgttcaagaatggaaatacaacctatcagaatctgcgggaattaatacctctctaatattaaaagtcattacttgaagaaaaacctaaaatacatggccttaagtgtcctaactatgagtaacaagtaaaaaataatgactctgtaagagtccgaaaatttctgaaggaggaccccagactcagatagtatgcgtttattctgcagaaacagccagcatgcaagggttgccattgtttccaaatggcaatgcctactgagacatttgagttccttttctaactggattgcttaattgcttctgagataacagcagacttctaaaacttagggcacatttcaagggttaccattaacctaaggtcataaagaagatatataccacaggtgcaaaaacaggagataagatattgactgagtttgtctaaacaaaactacagtcttaaactccccccatgaccctccaaggcatatggtgaaaggtgagccagatcattgctccttgtgtatatgcatgtaagcattctctgttataacctctgattgatgttaagagatattaaggaaaagtggttgttacttccttttatttttgttgttagaggtgtagtcatgtttgtgtgactatcttctttggggtttgtagaaagattactttcttgctttttctagggtgtagtttccctccttgtgttagtgttttccatctattatcctatgtagggctggatttatggaaagatattgtataaattttgttttaccatggaatattttgttttctccatctatggtaattgagagttttgctgggtatagtagcctgggcaggcatttgtgttctcttagggtctgtataacatctgcccaggatcttctagctttcatagtctccgatgagaaatccggtgttattctgataggttacttgacctttatatgttacttgaccttttttctttattgcttttaatattctttctttgtttagtgcatttgatgttttgattaatatgtgatgggagaaaaatctttttctggtccagtctatttggagttctgtaggcttcttgtatgttcatggtcatctcttctctcgcacgctcgactggccaggaagaacgacgctgcaacaggatccttctgcacacgtttattgggagagcttgattgtagaggcgaaaagacttcgagcccagaactggtgctgcttttataggcctaggacaggtgttctctctcatctgattggttaacttgtctctcatctgattggttaacttgtctctcatctgattggttaacttttgtcaattctcaaaacctcaccttggcaaaagaacctttactggctatgtatgtgtggtggccagctgtagccaactgccactctgcaactgccactctgcaactgccactctgtaactgccactctgtaactgccactctgcaacggcttcccacaatctctttctttaggttagggaagttttcttctataattttgttgaagacatttactagccctttaagttgggaatcttcactctcttctacacctattatccttaggtttggtcttctcattgtgtcctggatttcctggatgttttgggttaggacctttttgcattttctttgactgttgtgtcaatgttttcaatgatatcttctgcacctgagattctctcttctatctcttgtattctgttggtgatgtgtgcatctatgactcctgatctctttcctagattttctaactccagggttgtctccctttgtgatttctttattgtttctatttcaatttttagatcttggatggttttgttcatttccttcacctgttggattgtgttttcctgtaattctttaagggatttttgtgtttcctctttaaaggcttccagctatttacctgtgttctcctgtatttctttaagggagttatttatgtccttcctaaagtcctctctcactgtcatgagaagttgttttagattggaatcttgcttttctggtgtgatggtgtattcaggacttgctatggtgggagaattgggttctgatgatgccaggtaacattggtttctgttgcttatgttcttatccttgcctcccaccatctgattatctctagagctacctgccctcactatatctgactggaccctgtccttcctgtgatcctggttgtgtcagaactcctcagagttcagctgtctctgggatcctgtgatcatcctgagaccctgggtgtgtcagaactcctgagagtcaagctctctgggaccctgagatcctggtgtgaccaagctcctgggatcctgggatcctgagatcctgtggtcctgggcgtgttagagcacctgggggtggagcttcttctgggtgttgtgggactgcctgaggagttagcttccaggctctgcctagcacatgcctttaatcacagcactccagaggcagaggcaggcagatctcggtgagttccaaaccaccctgaactacagattgagttccaggacagccagaactacacagagaaaccctgtctagaaacaacataaaacaaaacaagcaacacaacaaacaacaacaaaaaggaaaagagaaaaaatattaaaaacaacacacagactggcactttgaaaagatcaattaaacttagagaccccacgcaagctaaccagagcaagaaagagacaactccaaaacatcagaaacagggaggggcatggccacagagatggcaggtatgaaatatcacacccaacagaaacctttatccaagaaagcagctacttgagtgagacagacagttccctaagaacacagctaaccacgttcacagaggaaaataactggaggtcaggcctgcaccacatgcctgccaatcaagccttaagaggcagaggcatgagggcagccaggctgtctacacagttagttccaagtgaggactgcacagtgagtccctgccaccaaaaagaagaaaaaaaaaaaaaaagaagtaagggaggagggaaaagaggggggaaggggagaggagaggagggaagaagaggagaagggagggagagaagagggaggggaaaggagagaaggagaaggaaaggaagagaagggaaggggagaaaggagaggggagaggaagggaagagaaaggaaaagagaggagggaacggggaagggagagcaggagagaggagggagggatctgaagaaatctgcttggcggcagaacacttccccagcatgctcaaggccatgggttccaccattggaaaacaagcacgttgaaacacctcgcattgattagcagaaagcagtccacaaagagtgacagacaggagtgatttcattggtaaatcttgccagcctaactgctcgcactttctctgcggtgtcagtg

SEQ ID NO: 197 - DNA, 2950 bp, Mus musculus
caggctcaaagcactagcggccacagggaggaagacagccgaggcggcagcagactggagtatgctctcttcctctgccccacgggccccttgctggaaaaactccaagagttctggagagagagcagacggcagtgtgcaaagaacagagcacatgaggtcttccctcacgtgacactctgtgactttttcacgtgtgaagaccagaaggtggagtgcttgtatgaggctctgagacgtgcaggggacaggatcctgggctccttccccaccctggttcctcttgttctccattcttccatcagctacctcggcttcttcatcaacgacagccccgctgacgccatccgggaattcgccatggcgtttgccacagaggcggcagtcctggcagactgtaccatcaagccctgcaccaagcagctgcacctgaccttggcccataagttctaccctcaccatcaaaggaccctggagcagctggccaaagccatccagcccagccactcctgccaatggacagctgccctgtactcccgagacatgcgttttgtgcactaccagaccctgaaggcgctgttccagtacaaaccccagaatgcagatgagctaatgctcagtgctggtgactacatcttcgtggaccccactcagcaagaagaggccagcgagggctgggccattgggatctcacatcggactggctgccggggcttcttgccagagaactacacggagcgagccaatgaggctgacacctgggttaagcacaggacgtatacattcaatctagccatggacctgaactctaggaaggattttgaagccagttgcaggggaaatggggaaccccacactccgtcaatgtcaaagagtgttagcagcatacaagctttgcaggctaccatctcgaggagaggcattctggtcatacgtcatggcgagagagtggaccaggtctttgggaagtcttggctacagcagtgtactactgctgatggaaaatactacaggccagacctgaacttcccccgcagcctgccaaggaggagcaacggcatcaaagactttgaaaacgatccaccgctatcatcctgtggaattttccaggccagacttgccggagaagccctgctggacagcggcgtcagagtcaccgcggtcttcgcgtctccagccctgcgctgcgtgcagacagccaagcacatcctagaagaactcaaactggagaagaagctgaagataagagttgagcctggaatcttcgagtggatgaagtgggaagccagcaaggccacactgaccttcttgaccttggaggagctgaaagaagcaaacttcaatgttgaccttgattataggccagcattgccccgctgctccctcatgccagctgagagctatgaccagtacgtggagagatgtgccgtgagcatggggcagatcatcaacacatgcccacaggacatgggcattacactcatcgtgagccacagctcagcgctcgactcctgcacaaggccactcctcgggctcccacccagagaatgtggggatttcgcccaactgattccatctctgggcatgtgcttctgtgaggaaaacagagaggacggaaagtgggacctggtgaatccgccagtaaagacgctgacacatggggccaactcggtctttaactggagaaactggatctcaagcaactgaggcagcccgagctttccaggaagaggtgactgccctatgccaaggcacaaggggctgtgataatggttacaaaggcatccaatgattacaaagttatcctagcctctcgcccagtgtgactggaggaaagaacaaaacacactcgatactcagggggaatagccatggctcagaccttcgtcactgccacccatggatctgctgtcctgccagcctctgcagaggccagagcagaggtctggattaggataccacattgcaacatgtgcactggtttggagagaacagaggaactgcctcacttccaggaactacagactccccgcacttgaagatgccacccatctattttgtatgttcttaggagccctccttattactataaccatcgctctttaggcagggccataccagctgaaaagggagcaatggtcaatgaaaaaagtggccagcccaccagatcaaaaccaggacagcagctggcaccagcactttaggggttccttgctgttgctcggacacagagttggagacagtagtgcttgaaagccatgcaaaattcctaacgcacagagacaaaatgtgtgattctggaggttagcggggtctgtgttcctctacagattctagaggactcttccccagccattccagaatccagaggcctctgtccttcctggcatcctatttattatattatattcctggcatctactaccttatgattctattcaaatcaatcagtttggggaaattctaaggcacggtcacatagcccctgccttgagcctcctgtctcaaagacgccatgacaaattgtgctcagtagcctaggatcttctctcatcttaagatccttggcaactaagcctgcaaagtcccttagccacaggggtcacttgttcatggtcccggaagttaggatgtgtcttagaaggccatcctccagcctacctcagcctctgttcttccaagcacattatggccgttgtaccagggtctagacataaagatctgtgcctcctacacacacttcgctcaggtcgttttctggctcctccttttctctcttctcaatgagcaggaagggatgggggctttgtgagtggaaggagggagccccttgccttaataggaaggggtggcagcactgtcacagcggggaaggccgttcctaagacctggactgagagaatgtgtaagcactgtatgtaaactcagcacgagctctggcttgggaacc

SEQ ID NO: 198 - protein, 560 aa, Mus musculus
QAQSTSGHREEDSRGGSRLEYALFLCPTGPLLEKLQEFWRESRRQCAKNRAHEVFPHVTLCDFFTCEDQKVECLYEALRRAGDRILGSFPTLVPLVLHSSISYLGFFINDSPADAIREFAMAFATEAAVLADCTIKPCTKQLHLTLAHKFYPHHQRTLEQLAKAIQPSHSCQWTAAKRDMRFVHYQTLKALFQYKPQNADELMLSAGDYIFVDPTQQEEASEGWAIGISHRTGCRGFLPENYTERANEADTWVKHRTYTFNLAMDLNSRKDFEASCRGNGEPHTPSMSKSVSSIQALQATISRRGILVIRHGERVDQVFGKSWLQQCTTADGKYYRPDLNFPRSLPRRSNGIKDFENDPPLSSCGIFQARLAGEALLDSGVRVTAVFDALRCVQTAKHIELKLEKKLKIRVEPGIFEWMKWEASKATLTFLTLEELKEANFNVDLDYRPALPRCSLMPAESYDQYVERCAVSMGQIINTCPQDMGITLIVSHSSALDSCWLLGLPPRECGDFAQLIPSLGMCFCEENREDGKWDLVNPPVKTLTHGANSVFNWRNWISSN

SEQ ID NO: 199 - DNA, 63751 bp, Homo sapiens
gaaggtgatattgttaaaattttttaaaagcttcaaaataatacaaatagtacatgttacttccaaaggaaatatagatatatagatagaaaaaggcaagaaattcaataataaattgctaataggattatctctgagtaatgatgccgtcgtgggtaatttttaaaaatcttttcaatgaactgtattttctaaactgttcttctaatgaacaatacattactctatttacgaggaaaagtttttgttcctccccactacttagtcatagcaaaataatcaaaaaataagagaaaggaatattatagtgctattaatattcatattatttatattataaaagattaggaacaactataggtcaaactatgatcaaatggctgtgtaaattgcatatctacttgatggaatactgtgattccataagaaaaaatttataaaaaccttttatggaaaaaacccacctgcctatatctgtactgtgcatgaaaccacacatacgggcaaaagcaggaagagactttgcagacataaaaaccaggtaagttttgggagtcaggtgattgcaagatttttttttctttcattgacacttagctaattttgagccatatttttaaatgtgtgtcttttcagttacttgaaacctcttctcccacctcccatcctttccaaacctcctccaagccaattttccagttggtttaaaagaaatcattagggtgacccccactcccactttctggaacctcaggcagagctcctgtggttcctccctagcaccaatgtgtcaggaatctgcctgcgtccaagccctgacttccagaaccggcaaccccacagctccctttgaccagtcctgactatctctggtcaaaaagatcctagccgtataggttgctagagagtccactgttttatcaggcatttgtgacttatttacgaaaccaacttttttccttcagttgttaggagccactccgtcatctgctgctggattttaatctaggcctctaatatctttggcgacatccagtttatcctgagttttcggagggactggtggccactgcttctcaggacttcctggaggactcagagatttcctggccaggatctgacctccttcaggattgacaggacaattgtggagccccagtctctgaaaacctccaacaagagaagaaaacaccggtctccagggagagagcaaagggcttaacgaaacgatcccctctccaatgccccttctccctgagattctgcagatctagggaagtgcaggtgtccagcctgtgggtgtcagaatggctggggagatatttcccccacagggacagtcagtcacattggtcacctacatgagggtatgggcagaaatcacagagtcctcacctgggtccacttacctggtgcaacaggacttattttcaaatcatcaaggccaaaaagcgatcggaatgagaagggggcttcaacagcaggcggatcattttcccccatggtgactatttcaggacctctgacatccggctccgcctccacctctacctccttagccgaggaagaacagaaagcatttgttcccctatttatacttgtagcatcaggtgcatcttggtcatacggtaaatctttgaaattcgacagtccacacaaagcgcattcagtatcgattaaccaaaaacagtcatctggtgagaatgcattttcgtctgagctacagcagataacagaaaagcttctagaattagcaaaaaaaaaaaaaaaaaaaaagtatgaacttaattctgctaagacaatgactttcccattgtttgtccaaccaatcttcaaatcgattgctttagagggactccctctcaccatttagaagttgccatattgctattgttcagaagataaattactctcaaagccctttccattgcttttttgcgattgttttcacctgtcccacataaacgcaattctttccctgtgcgtgtggtacacctaccataagcataagtagtttcggtactcacataattcccgagtcccaaaaatgtagatggcaccacggaagagatagtaggccacagtgttactggcttcccataaacacagccctttcctggctcacacgggcatgacctaattaagaacgaaagtacccgagccgtccggtgcccggtccttcccccacatagcaaagtggggagtggctttggaccaacggcttgcatcaaaataaccccggggctgtgtttcctacgaaagaattccacctatcacaatgccaaggagaccagagacctttctaagtcattccctgtaactctgagagggcggaggaagcagggaaatagcagaagattcccaattaaattctagttccctctcccagatatcaggcatggctgctctgggaacctgcttcctccaagggctaaaatccacaggggctccagcaggcacatcagcacagacactcagatcatccgctttcattccctttgtgactacctgttgtaacgtttgaaattccaaagggatctagtaagccatttgaagcaacccgtgtttcccaagatcatagtaaaatctaaacaagagttctgtgccaaaaatgttcatttcatttctatcgcaagaagagcttgaaagagtaacttagaaaagcaagaagttcatgttgggccattttctggctttcattcttgctgatacctctgtttattatcagcatgtagcaaattacatcgtttatccatataaaaagaataagtgggcaaatggcttctgaaagatggaacctgggtgagaacatcccctcccaaacaggctgtggttggcaagctgtacaacactgagaagtgttgagaagcatcttctctcctcacacccattttactcaccatttctggagctgccatcattaaaagcagaaataatttcctttttcattataaaaacaagtgtgatggtaagcaggccgccaacaggttagtccaatcggggaatattttccccaagtcactcagccttgtcgactcaatcatcgcagcaaatggcattatcgcgggcatctgtgtaacccaagctgccgtgggcctatcaaatagcccttggtggtatggctgcagagaccagggagggaaaaatgtggcttccctttaattagtcagtaaggtgagcaaaccttttcagaagctttgcatcagggagtgatcggaacacagccgctccttttacttgaaagaaggggtaggctctgcccagtgctgagcatgtgaccgtcaagagggcagacatactctctggtgggggtttctgtccctccctgtaactgagcccccaagttcaattctgcagctactcctgcagacaaaagatggggagcctgaagatgctcatcacagcctgcgctccacaaaagacacgtcatgtttccttcctcggaggcctctgcatcccaagaggcttctgcacacagcactgcttaaaggggtttaaccgctgctgtggggaccagagcgctgagcatctttgaagggctgaatttaccattgtggatggcaactcgcaaatccatgcatttattcagcaaatatttagcaagcatctgccatgggccagactctagacacagtgcagccagcaagaaaaacaaagtgctcccatggggccccagatgttaagcgctaggaagagattaggccggggagggtctgagagagatgagggcagagtggtacaggacggcctctagggagagtgttgtttcagcagggaccttgatgatgttttagtagagaccttggtgaccagtgaagtgagtcttgtgaaattcctccaaggagggcgaccaccagctccaaagcctggaataggggccacgctggagtgtttgaggaaccccaagaggggccgtgagcctagaaagcagggaacagggaatagccgatggcagatcccaaggcccaggggcatgggaagggctctggtttgcctttgatgtgtggaaagccttgggcgatctcaatggggcaaatttgggttgacaggcagggcatagagtggggtaaggatggggggacacaaggacagccacaaggaggctgcacctcatgggccacaagggccatgactcggcacgagtggtgatgacggtgaggactggctgcctgaggttgattttgaaggcagaattggcaggatgtgctgacggcaaacgcctgagagatgcgtccaggcagtccttgattaagacagtcttactttctccgtcccagtaggtacctgcccacacacctgtcagtgcctttgggtgtgatctatggtctccttcaagctcacacatctctccttcacctatttcctgactactctttctggtccctcaacgaatgtttgccctcaaaggcaatgacaggaaatttaacatgtcattctttctttgcttttacctgtgtgttataggagatgctccccgctggagtacagctctggcgggacagagtctggaatgcactttcactcctaagaccccgccgtgcccagcacagccatgtgtgtgtgacaggggctctgtctgcatagaagagctgatcataaaccctggggggacaaataacaccaaatcgacatacaataaccaactacgagggcatgttaacacgtgtgtcagatgtaggtcaaaggtcaagccagctccccacggggtagcagggagaggccctacaagggtggctggtcttccttgctgtaaaatatcctctcagaaagtttaccgacaaatcaattccactgagctcaaactaaaattttgaggaaccaaacaaataagcttatctggggcccagcgcgtgatagttacgcagccagtgccatgagcagacttggtttcagggcatgagcgccttatcctatcctgatgtctcctgggagccccatgaagctttagtaacgatttgcaaacagcttgagttacaggcacattctcttcagtaagtgagggaggaaactggtagactcttccctgatgggcttggaagataacttttcaagttaggaaggcaggatgaagctagatgtaggcatcttctggcctacacaaataagatttttttaagagaaatgcatagaagcatttttcattttaatatgttataaacataacacaattgctcaaaacagggtttattatttagaagagaaaaatatacttgagtagagactatatttcatacccaaatctactttttccctctgggtcacaagctttctctatttgcagactttcaaattcaagataaatcatttgattgtggaattatttcatcttttgaattcctcaaagaaaaaggataatgaagtgtgtggacattatgctaaatgaaataagccagacggagaaagacaaatactgcaggatcgcacttatatgtggaatcttaaaaaaaaaaaaaaaaaaaaaaaaaaaaaaaaaaaaaaaaaaaaaaagttgaatacatagagaataaagtggggttctcaggggagggtgtaggggcaggaaatggagaggtgtggatcaaagggtgcaaagctgcagatgtgtaggatgaagaagtccagagacggaagatacagctgacagccagaggtataatatcttattgaatactgaaaatttgcccacagcagattttagtttcggttaccatgaaaaaaaagtaaaaaaagtaacaatgcaagatgatagatatgttaatttgcttgatgacagcgctcatttcactattatgaatatagcaaaacatcccattgtacaccttaaatacgtacagtaaaaagaatattattattatatttatttattattattattattattttgagactgtctcactctgtcaccccggctggagtgcagtggcgtgatctcagctcactgcaagctctgtctcccaggttcacgccattctcctgcctcagcctcccaagtagctgggactacaggctaccaccctgcccggctaatatttttgtatttttaatagagacagggtttcactgtgttagccaggatggtctcgatctcctgaccttatgatccgcccacctcagcctcccaaattgctgggattacaggcatgagccaccgcgcccggccccaaaagaatattatttaaaaatcaggcagggcacagtggctcacacctgtaatcccagcactttgggaagctgaggcaggtggatcacctgaggtctggagttccagccgggccaacatagtgaaaccccatctctactaaatatataaaaattagccaggcatggtggtgtacgcctgtagtcccagccactcgggaggctgaggcaggagaatcacttgaacccaggaggcagaggttgcagtgagcctagatcatgccaccgcactccagcctgggtgacggagtgagattctgcctcaaaaaagtgaaaataaaactatacaaataaatatcacaatatgctcacatttaatggtgaaatattgagaccttgtcctctgaaatggagagttatacaagaaggtgcactagtaccacatctgttcaacatttgacttgggttccaagtcagtgcaataaaggcaaaaaaaatagaaggaactattatgcgtagagctgccatgaacattcatagaccaatctttgtgtggacacacgttttcatgtatatttacctttataagaaaccctccaaatgttccccaaagtggttggacagttacgcattcccaccagcacagtgtgagagctcctgttactccccagccttgtgtaaacctggtattttccattttagctcttctggtgggtgtgctgtggaatcacattgcggttttaatttgcatttccctgatgactaatgatgttgagcatcttttcatgtctatgtatatatcttctttttaaaagtatcttttttgatactttgcccattcttaaaatagatgcttgttttcttattatttgttataagtatatataaaatattctgtatattctagaaacaagtcctttgtcagctatatgtatagtgatactttctcccagtctgtggttcaccttattatactctttaagatgtctttcaaagagcagaagttttcaactttggtgaagtacagttcatcaactttttcttttgttggtttattcgctttatgtcctaagaaagttttgcaaactccaacatagcaaacattttttttctaggttttcttaaggagttttatagttttagcatttacattttgagttaatttttgtatataatgtgaggtaagggttgaggttcgtttttcctcctaccaatatgcagttttcctagcactaatttttttttttttttttttcagacagggtctcattctgtcacccaggctggaatgcagtgatgcaatcacagctcattgcagcctcgatttcttgggcttaagccatcatcccacttcagcctcctgagtagctggaactaatgccaccatgtcttttttttttttttttttaagagacggagtctcactctgctgccctggctgatctcaaactcctgggcccaagtgatcctcccactttggcctcccaaactgctgagattatgggctgagcctctagcaccatttatcaaaagcattatccttcccccattgaatttcattggcatccttgttgaaaatcaattgattgtaggtgtgaatctttttgcactacccaatgacacactatgacacaccatggcaacctgatttgtaaatgtttatgaaaaagcaaaggacaaaaccagagggtttagcactatagtgattaaaacagtgtagaatgggcacaaagagggacaaatcaaacaagagagcacacaagttagaaaaaactaatccatatacagtcacttgatttacaataagcctcctactgcaattcactgggcaaaggatagccctttcaatgcggaagtagatgaaagtttacccctacctcacaccatacacagaatgaattcaaatggatcatagagctaaatatgaagagcaaaagtagcaaaacttctagaacaaaacatagatgatcttcatcgatgttggattaacaacaatctcttgaacaggatgcagaaaactctaaccagagttcccacaaattgataagaaaagcaaacaccctagtgaaaaaaaaaaaagagcagaatatctgaacaggaacttccccagagaggatattcaaatgggcaataagcctgtgaaatggtgcccaatatcattatccctcagggaaatacaaatgggaaccacagggagatacaactacacaccacccccaccacagagtggctaaaattagggactgataatattaagtgtgcatgaggatatagagctttgtacaactgcttggcagttcctaatggagtttcacgtgctctgtgatccaacaaccccactcctagatgcacacctaacagaaatgcatgcacaaggcactcaaagacacatacaagaacgtcctcagcaacattagttacaatagcaaaacaaccgaaaacttcctgaatgcatatcaacagagaaatggataaatgaattatgttatatttattttatttatttatttttgagctggagtctcactctgtcccaggctggagtgcagtgatgcaatctttgctcactgtaacctccacctcctgggttcaaatgattctcctgcttcaccctcctgagtagctgggattacaggcatgcaccaccatgcccaactaatttttgtattttttagtagagacagggtttcaacatgttggccaggctggtctcgaactcctgacctcaggtgatccaccccccccttggcctcccaaagtcccaaagtgctgggattacaggcgtgagccaccacgcctggctggtatatttattaatcaaatactacacagcaataacagtgaactaactgtggctacaagcaataatgtggataaattttacaggcataatttgaggaaaaagaaatgagatatgatagagaatatgctatatggttctatttacataaggctcaaccacaggcacaattcatatacaagtgatacagcagtttactttctgggggagggaggagataactggaggaggctgagctgggggcagaggtgcatctgaggttctgagaatgttccagagcaggctatctccaccttggcactagtgaaattttgttggggagactgtcctgggcactgtgacattcccggcctctacccactagtgccggtaccacgatgtccaccccacccaccaccacccccgcctcattttggaaacaaaaatgtctccagacatttccaaatgtccccttgggtggaggaggtacaaaattcccctggttgccctgtttgattttgggtcgtgggggaattaggggtgtgggctcatttatggaaattccttgagctatacacatatgattcatcaacttttctgtacacatataaagcttttaaagtttttaaaataaaaaaacaagtcaatgaatgactgaaagaaccagtaagttttccagcaatccgagacaatagatagagtggggtttaatgtcttgttcacagacaaggagactgggatccagggtgggtcagggcagggggccagcaggatccaggagggaactcattccctgacttctcctccgcttccttcccccatgctctcacgcattcttgctcccgaatactagccaagtccctacagaggctgatcccgtgcaggggctcggttggacctttagcctcaaactcccgtggtggaaacagttaggattggtggacgctgcacccagcatcctgcaaacagaattctgaaaactgatatctcatgcaaacaggatatcaacttttgtcagaaagatcaaaaagagcttgaggtttttcttcacagcctcagccttgcctctccccctcttgctttatctcctcatttctgtgtgcaggcgagcttcttggcctaagggcaggaagagatggcagcgggggagacgcagctctacgccaaggtctccaacaagctcaagagccgcagcagcccctcgctcctggagcccctcctggccatgggcttcccggtgcacaccgcgtgagtactgcccagagaccccggggcccagccagtaaggctggtgccagaccctgctgcggcccccggcatggagctgcaggggtgtagggtacggcttcctgccaaagcagtgcaccttgcagggtaagacactgcctcttcacagggccctcttctgcttctcgtaaatgaggtgatcttgaccaagcttgtccaacccacatgaggcccaggacagctttgggcttaagccatcatcccacctcagcctcctaaggctgccctgttcaatttgtgttggctgcccaacacaaattggtaaactttcttaaaatattatgagattttttttttagctcattagctattattagtgttagcgtattttatgtgtggcccagggaggcacaagaatacccctgatattcttgaccttttaaagaccagctcggctggctgactgggggaccctgaaatttgtgaaaatcagaagccatgtattactctgggtgccccattttgggggtttggaggagattggggcctggttgtaatctctttgtgtgcagctcagtgactctgaaagtggcgtttcaagatattcaaactctaacgtgaaaggccccaaagcccgctgagtctctaacactgggaccaactgtcagcagggctgtgcttccacgctgcccggggaaagtcacttgtcctcagagacaatcccttgagtgtctgataacgaaacaaatgggtaggaaacttcagacacagtgtgagcgcgaccctgcttacccaagggaaaggcctgcatgtggaagagcttagccttcagagttaccactctcggagagggaggccacgacaccaacattgggttacagctttcatggcaaaccagtgccttaaatctgacccattcattttttcacatggaaaaatgtatcagaaacacactttaaatctgacccattcattttttcacatggaaaaatgtatcagaaacacactttaggtaactttgggttggggaaggagctaaactttccttccacactataacaaaagcttggccaaattgggtgaagtaactctgaagctagacaaacccatttcttctccccaaatcagggctttgtcgtcactgttatgttcaagctaagccaggggcctttgaatggggagtggggtcaggcatgtgcagggcggccaccgggcaccgtccaggcattacagacaaggcagcttttgtccactgctcaccacccagtgcaggcaggacactgggcccagagagtgcattagtggcggaggtggaacccgaaccagctttccatgcctttgaaggagtccacgctggattttactactaaacgtatagcatggacttctactcaaaattccttccagtttaaacattaagcacatgttggaggaagagaaatgtgtgttaatttccccacaccagagcacctcatagtaagtgccctgcaccaaggctgccttgttcaaacctctccaggtggccacagccccatcggtgcccacccaaatagcagcattcggcatcatgtggtgggttcctcatggacgcccgctgtttccagtctgcattcctgataaattacctttgctatattccattctgtttcatttggtccagttctgcccaattcaatgcaatgtacttacgtcccgggttaccgtgatgaataagactcagtcctgtgttcagggagttcttggtctagcaggggagagccgtgggtgcaaggggactgtgtaagccgtaacaagtgcctgcctgggtgctttggaaagggctgtttcccagcagagaggtgtgggaggcgagcctggggatcagggtcgctgatgctggggtgaggaaagcgtgtgtccgagccaggggcacgttccgcagggtgggtccatttgatctaggcagtggggggggggggggcaggccagggagagggattgcaggagcgggcggaggtcaggtcctcagccctgagaccccgtgccaagggctgaagcgggtagccagggaaggacagtgagggggaggtgtgagctggtcagcattgtccaaaaccacgatggcagcactcaggggacaggcgctagaacttccagctggaagttcagcatcaggccctcttcagagcaccccccaaagatcctgggtgtgcaaggccacaccctgcctctctgacccttttcccaagaatgggcgacgtgactttgtgtctgtgtctgctcttctgcaggctgaaagcgttggcagccacggggaggaagacggcggaggaggccttggcctggtgagtgcagctgcttctgtagacccaggggcgtttgggctgaattccctgtgcctaaggactccctcccaccagggctgataccaggaagagccgggcgcctctgggtgggatggggccactgcggaagtgaaacaaaataacctccctgcctacccatagtgcactgagggaggggcacagggctttggttaaccatggaaagagaaagagagaactctgaacaaggctttcttcacttacaaacctgattcaatccaatttgactgccaagaagaacaggttcatgtgctttgttgagtaaatggggaagacatgattgttgtgttgtgataagcacgtaaatgagggtaattgttagaataaagtaattaggttaaaaatggtaacatttgggtttatattagtactgctaatattcagcctatttcagtaattgaagagcaggctgggattttgcatacttgtgtttgattatgtcctcctcaactgcctactacgatggataagattgagatagataggaggatgtttgtgtttattgatggaaagatttgagacataattgacatctttgctgatagagactagcggccaccatgctctcgggctgcctctgaggggaagggagtttactggtggtcatgaagccaggtgtgtgggtctaagggtgccaggtgtgtgggtcgggtgagggctctgatttgaggtgacctcaccaggtaccagctgcgtgagtgattcttcaagccacccactgccatgggcctgttctctgctctggggatggagaggagggccaccgtttctctaaaaccctctcctacccggatgtgctgtggggagtccttcatcctctgccctgagatagccacggggaaaatcaaacaataaaaaccaggtcctgggaggctggagtgtcctctccaaagcaggagggcagatactgatcctgggtctctgaacgtgcagtgttcccaatgggatgccccctcctcctccagaaagtgtaggccacgggcaaaatgggcaaccccttcacagagtccactaaagccagttgccaattttggatcagaaacaagcccactgctgtgaagggcatggccagcacctgcccactgcaacccagtcaataagactaggaaccccaccaaaaaatagggaggcaatggggtcccctagactgtcaagagcaccccaacctctcactagtaaccagggaggtggtgcaaattaagatatcattagagcaaacaaggtaactccaagtgttgatgagggtgagggaagcagggcctcacacgtcactggtgtcactgaggaaggcagtgctgggtatctgccaaccttggcaatatgcacagcccaccagcctccgtcgtgcgtctaagcagattccctggagaaatgcaaggagcctaaagagacatgtacaaagatcttgattgcagggttatgaaatggttttaaaataaaataatttagatgttcatcaatgcgggaatgaacaagtgcaacattgtatatgtatacatgaactattacacagcctttaacaaattcgcgctgacaaacttcactagacacgtgtgtatcaacagggattaattgaaaagacatggtagaggaaaaatgccagttgtagaataatttgaataacagcttatgatttatgtaaaacaagtgctatctataagtccgttacttaaatttctgggagaaggcaaagcagcttcaccctctgggtgaaccctggaaagggggagggtgggaaccacgatggagaggagtggcaacttcttctgtgatttttattgaagagaatatggtcttgcgtaagttctgtttcctctagtgattgaatactactttctaaattgaaaattatatcacaggcactttgctgagtaattagaaattcttccaaaccatgatttctaatgaatgcacggtaaatagatttgctatcagttatggagtttttcttctttcttctaaataaccctaaataaccttctaactttcttctaaatagccctaaatagatggttcatgtgcaaagttttgcctatacagtactttgtgctctttcctcgggagaaatttctggaagtagaattattaatgcaaagagtgtgggcattttaagactctcaatacctattggcaaattgcttcacataaaagttgaaaggtctgtccttaagtcctgctgcatcttttacacattgagcagaacttttatcctttttattgaaaaaatctttgtgaacttgacagatgagaaaaatgccgtctcggagctattttatttccatttttattgttagtgacaatgaactcctatgttgggtcatccgtcgtttttcctttaatttaaaataactgtctgcctgaaatcccagccagtcaggaggctgaggcaggaaaattgcttgaaccggagaggtggaggttgcagtgagctgagattgtgccactgcactccagcctgggtgacagagaaagactccatctcaaaaataaaataaaataaaataaaataaaataaaataaaataaaataaaataaaataaaataaaataaaaactgtctgaatctaaagaaacgcagcagctacctaaattttgtctaggtttttggttttggtttttatatgtaatttgaagtttgaggtaaaatacaaatgtgaggtttttccacaaaattttcccacaccatcaaggagatgctgggcccacggatcattggaagaccaggttttaggtcttgctgtcaactttctttcattttttctacctttgactttggaatcagactaaggtgggtctgagagcaggacttacactgaccaggtctgtgccacacacagctgtgccgcagtgcctcccaccagtaggatggctgtgagattaatttatgtcatgagcatatatgatgtcttcagtgtgccctataattctgcattgctgtcattgtcattctgttgtgtatcctcaaaggggaaaactctttttgttgtgacagtgggtgatgccggcttgctctctgttgcaggctgcatgatcattgcaatgacccttccctagacgaccccatcccccaggagtatgcccttttcctctgtccaacggggcccctgctggaaaaacttcaagagttctggagagagagcaagcgccagtgtgcaaagaacagagctcatgaggtcttcccacacgtgacactctgtgacttcttcacggtgagtcaacccagtgtgccttcaatgctcacggcagctggaggcatttttctgtgctaactaggccatgatgggacaaagttgacttatttaaatgggatagtccagaactgcatcattagctggcaccttcatatgagctgtcctttattttcctctttgccttcatctggtcaactcctattaatccttcagaacccaactcatttatcctctcccctttttgagtcttctccagctccccaggcaaaaggagttgctgcccattttctcgttcatgtgtctagtggcacttttgtatcatacgggccatgtgtctggtgcagcaccgcatccctcaccagaccgagtccctcaagggaaggcagatacctcactcatctttgcacccccagaaactagcacagcccctaaaacagagtttgtgcttccaaaatgtgtggtaagtcaactcaaggatgggtgattgttggctacccacaaatgcagaacttttccctgtctcagggaccagccgtctgattcagaaaaaaaatggcccagtgggtagctccacagcaaaacacaatggcccagcaggcagctctacaggggcaccgggaagacaagaagaatgtgggagctgctcaggagaaaagaaggagaagggagagacagacagccactgctctactcagctccgccagaggggcttaaggaagggcacacccacttctgctaccgcggcctggccccaactctgctgttggcaaactgatttgttccacccatttcaaggaattccatcagggcccaaggaaccctccattccaacaccaggcccctcggtgctggatggaaaggaggaatgcaaacctctgaagggaaaagatttctggaagatgtcccaggagaagcagtaccttccaaagcctccaaccaccaccccggattgcccgagacttgcagggatccccagagcacaagactaaacctggaaaagccccagaaaaatcgagagagttttccccctacatcgacatcaatggtacttgtgacaagctgactcccttctggttcaccctctggagccaacggggaaaggcaaggcagcccaagccatgtgacacagctcagaaatcagagcaggccttggccccccactccttccccagcccactgaggtgcaagcacacacacacacacacagatagacacagagacacacacatagctcacacacatagacacacacagattgacacagagacttacacatgcacacagatacacacacatacatgcatacagacatacatagatatagacacacagacacacacagatagacacagagacgtacacacggcacacacagatacacacacatacatgcatacagacatacatagatatagacacacagacacacacagacatggagacgtacacacggcacacacagatacacacacatacatgcatacagacacacacagagacacagatacacacagacacacacagatagacacagagacgtacacagcacacacagatacacacacatacctgcatacagacatacatagatatagacacacagacacacacatatatacatgcatacatggatacagacatacacagacacacacagatagacacacatacacactacatgtacataggtacacatgcaaacagatacacacagatatacacacacaggaatacacagatacatgcacatagacacacacagacacacacagagacacacattagatagacacacatgcacaaacacagacatgcacatacatgcacatacatagacaaatgcacacatacagacacacacataagcaccacatgcacacatatgcacacagatacacacatgcatacacacagacacacatatagacatacgcagacacacagacacacatagacatacgcatatgcagacacacacacagacacacacacatatagacatatgcagacacaaacacactcacacacctccctctgtcgttagctcctcccagtcccccaccccagttctggcctggccgtggttagtggagctcccctcacaggcagaagagtgtaacggagactcactgtgtaccttgatgctgtaaaatgaaaacactaatcttccgaagtgtgatattgatcacagctacacttataacatgactattcttgaaaattacatatctgaggccaagaaacacaatgtgagacggattcaggaatggacatgtgttcactgggtggttttgtgttgagtgccgttgagggttgcagagaaaacagacagggaggaatgtcaggccggcctgtccatggggagacggaagctgcattaaacactgtgatctggcctcatacttgggcttgtaagaagcactgtgggaaattccgagggcagcccggtgctgggaagagaagggatcaggccaactcccgccaggagggtgtggtgtctgggtttcccctgtggtccgatgtggccaatggcactgggaaggttttcaagcccaggaagcagcctccccagggcggtaggcaacaccgagcccagatgtcaggagaggctgcgtctggctggaggatgggggtgggagccccgtgggcaaggctgtcgggccagcacctgtcgggctccgtgggcctgagggattctccaggtgacagagagcctgcggcctcaggggtgggagctgcatcagaaagagggtcctgcagccactcagggggcatcagggaggccgggccaggggctgtgcaggctcaggtcctccagggagcagaccccaaggcagaattcccagtgcaggagacgcacaggggagagactgctggtgaaggcaaaagaggaggagagggttggaggcaggcagagcctcagtgccttagaggagtccctgtggaacccgactcagtgctcagccgtggaagagagggtggccccgcagctggaagtgcagctgagtcccgctcactacaggctctgagcagtgcctgggcagccttggagtctgctagaaacctccagaagccaaatcatgcaaacctgagcaaagcagtgtgccatgggactgaggaaagggcctggcaggtgatgagcacgtgccatggagggaggggatgcagttcaacgaccaggggatttccaacctgggcacctaaaggagactccaacctgcaaagaaacttacctgaaatatttgaaaaaaccgaggtccaggtatagaacaaatccataaccccagacacaaagggacgcaataaattatgttacagcgctttgaacagaaaagaatctcactttaattgctgcctgattgttattaattaaattaatagatgacttctgatgagaggtgtggaaacacaggctctgtctctgtccccttagtgtgaagaccagaaggtggaatgcctgtacgaggcgctgaagagagctggagacaggctcctgggctccttccccacggccgtgcctctggctctccactcctccatcagctacctcggcttcttcgtcagtggcagccccgcagacgtcatccgggaattcgccatgaccttcgccacggaagcatctctcttagcaggtgggcagccctggccagttgcaaacacagggctggattcacagtgagtgagccctctgtggcagggactagcccccggcacatggatgcagtgggtgggttccaggggagcagagcccagcagcaatggtgggatggctgggtgggctttcttccgggctcagtggctgcacctgtcctcacccaggcacttccgtttcccgcttctggattttcagccaggtgcctggacatggccctaacctgaggctgagcaatttaactagagcctccttcgtgagccactacatccttcaaaaatgtaagccattagaaagcttccggaccagctttggtcttctctttaggcgggaatagccttgttctcattatgtggtttttaaaatgcttagctatatgccaacagcctgggaaagtgccccagaagggtgtgccaagcatcaagcctgagtgggtgactgtgacggggttggaggctggtgcacacagggagtcagggcctccccaccccagccttgagtgggagacacacaagtcctacgtgacttatttctgtattttcagtatgagcttagtgctctctccttggcctctccagggaaagattatttagactcatattcagaatcatcaaaattcccttctctccaaacaccagccctggcctggagaccaaggctaccattggggtttagtggaaaggattgtggacttgacgtcagaagatgtgatttttttctgtgtccctgatgagtggcatgaccttaatcaagtcatgtccactctctctgtctctttttctttctctacaaaacaatgagggctctcactcttcaagaacaatgttgcctgagtctgtggcccatcctgccatagttcccgggacacagaaggcactcagtattgctgagatttgccgactctaaaatctgacgaggccgcagtgccttggtgggagggctccccactttctctctctgggagcgtgtctgtctgtgctcagacatgtatgaagcacagatcctggcctgtaaatccatccctgaatcctgggcttccacttggatggcagcttgtgagtctggagatcgaatctgctgaataattagaaagtcgcccccggtctttgtggattagtatcctttatcaaatgatggctctttcacacccaggccctcccccagtgaacctcattggcagcatcttaaaaacaggaagactgaggctgcaaagggtgaagggcctgcccaaggtcctgtggtgtgtagagcggtgtcccctaaaaatgtttgtccaccaggaacttgggaatgtgacctcacttgggaatagggcctgtgcagatgcgattggttgggaggaggtcacactgcattagggtgggttcccgtaagggtagaggccgcacagagacacagagaagccatgtgccgactgaggcagagactggagtgatgtagccacaagccaagggacgcctggggccaccggaaactggaagaagccaggaaggacccttcccaggagctttcggggagagcacagccctgccaacaccttgattttgaacctctagtctccagaaatgggaggcaatacatttctgttgtttgaaaccaatctagtcccctaaccaggctggcggagcagggacctgaacccacctctgtcctgctccatgctgcctgggttcatgctgggcagccccacttcctgtgggagccagcgttgacctcacatctacgccccgaccctaagcaggctgtgtcctgcccttccatggcccatgctctcagcctgacaccgagggggtggaggggactctctcagtgatgagtgaccagtcactgctctgaagtggccgaggtccctcttggggcaaatgcatgaggcccccttgcccgcgttggtcctccccagtgaaacgtgcccataggcacaggtccgcagagagaaggaaacgcaaggacccgttcagaagtcggtgtgactcactctgacgtcagcaacctgcagtgggtctttcccaggccacactcactcgcatggcaaggcggtcctccccgactgctaaaaacaaaagtcaggaaaggaatttccccaccacctacacactcatgctgctccccaccacctacacactcatgctgctctgggctgtgcagcctcagtgccccagctttcctagagaccgtgggagcttcccatttgcctctaaaggctcacctctcacgtgggagacagcagtgagccccaacttcggggctccagggaaaggcttgcatcaaccttgaccttttttagggggtgagcagatcctgtttgtaagtgccctgccgtggagtgggggcagggtacgtctgtgcaccgacacggcgtctctagcaggaaactttaggttaggaggctgatttcccactgcagccttggcgagcaggcgctgccgtcctccagcagatgctgctgaagcagaaattgggcaggcccagaggctcagtcaaggtcaccctgcaaaagggggcaaagtgcagcctaaaactaggtctatctgacaccaaagtttgtgttgttcccgtcaagacacagaccgcctccctaggacataaaatactttgtggctcaactgaaatcagatcctggctgctttggtgatgccagctgctctgctcagactgacctgagagcccctggcaggaccagggagggctagggccacaggggcagaggacacccaaaaagacctgaggctcaaccactcccaggacttcctgcttcaccaaaacaaggtgaaccttaaagacactgtgtgttttatagttttgttgcctaaagagttttcttcttgaaactctacgattaaacaaaaagccgttgaactggagctcgggcctgcaagtccaggccactgggtaacgtgcacaccccggggaatggaggagccgtttactctgtgcatctgaatcgtgcattcgggcagctagcctgcaaaccgataggcccccgagaccctgaacccacatctccatatcgtcctctttcctacttcctggaaaaatctacagggatccagccatctcctttatgatgtgagttctgagcgggccaaatgagctctgagttctgagagcccttgccttgtggaggaagcatggaggtcggaggaaggagacatttaggtaacggtgtcctggcaccctctgtgtttccctgatttcacagactgctccgtgaagccttgcaccaaacagctgcatctgaccttggcccacaagttctacccccaccaccagaggacgctggagcagctggccagagccatccccctgggccacagctgccagtggaccgcagcactctactcccgagacatgcgctttgtgcactaccaggtgagagagctgagcaggggctcataagaagcagatgaatgggctgggctcggtggctcacgcctgtaatcccagcactttgggaggccgaggcggcggatcatgaggtcaggagatggagaccatcctggctaacatggtgaaacctcgtctctactaaaaatacaaaaaattagccaggcacggcggcgggcacctgtagtcccagctactcaggaggctgaggcaggagaatggagtgaacccgggaggcggagcttgcagcgagtggaggtagcatcactgcactccagcctgggctacagagcgagacgtctcaaaaaaagaagcagatgagtgaacggccactcacctgacagcatgtaccccctggagccctccaagggagatatgttagtagcaaggaaaatttctattgcttctctaaagccattctctttcttgtgcaatttacaaccagcattcttttatatgtgagttagagatgcacagacaacaaaatagaagcatttccaatattagaaaaggaagctgggtgtggtggctcacacctataatcccagcactttgggaggctgaggcaggtggatcacttcaggtcaggtgttcgagaccagcctgggcaacagggcaaaacgctgtctctactaaaaatacagaaaattagccgggcgtgatggcacgaacctgtaatcccagctactcgggaggctgaggcagaagaatcacttgaacctgggaggtggaggttgcagtgagcagagatcgtaccgttgcactccagcctgggcaacagagcgagactggcaaaaaaaaaaaaaaaaaaaaaaaagacagaaaggaaaggactattgtaaagatctatgaatacatgttttgcttattaattcttttttatttatttattttttaaatgtaggggccatgctaatcttctctgcagcattccaattttagttatatgtgctgccaaagtgagcacaattcactttaaagaatgatttgagtgaaacctcattctgggacttcctgcccatgaatcgatgggtttagaaacgaagtgtgtgatgctcctttcagacccagagagcacgtgtgaatgaatccaccatgttctgtatcgtatgaggtgtcaataacctcacaccgaggaaggcggatgtgaaagtctgcttatgccttcagatcttttgtagacaaaaaagtacctagatggatggatgatggatagatcccaaaatgtatctcttttttttttctttttttcttttttttttttttttttttttgagagggagtctcaccctgtcacccagggtagaatgcagtggagtgatctgcgcccacttcaaccttcgcctcccaggttcaagtgattctcctgcctcaagcttcccaagtagctgggactacaggcacccgccaccatgtccagctaatttttgtattttcagtagagacggggtttcaccatattggccaggctggtctcaaactcctgaccttgtgatccacccacctcggccttccaaagtgctgggattacaggcgtgagccaccgcgcctggccccaaaatgtatttctaaatctatccaaagaattctatgctgcgtttcattacattctgtgctatatattgccagacaaagctttggatggagtcttggagacacagaacacattggaggggcagaaagcaggaggtggcaggtgataggcctcctattgctgccattttccaatgtaaatctttgctcgagacgtgaaacccctttgcctcttttctagaccctgagagccctattccagtacaaaccccagaacgtggatgagctgacgctaagtcctggtgactacatctttgtggaccccacgcagcaggacgaagccagcgagggctgggtgattgggatctcacagcggacgggctgccggggcttcctgccggaaaactacacggatcgagccagtgagtctgacacgtgggtgaagcacaggtgagtgctgcctctggctgcagccccgtcatctctctctgagttactgtgtgagagtgcccacctgccaacagtgtgcttctagaccattccattattggtaaaattgcattctgtatgctgacaaaattattcctgcaggtatatagtaaacatcttggttcgtccctggttttctgatgataacattcaaaaaagaatgaattactctgcattagagtaatttgagatggtaatccccaaattactgcaaaatactacttctttatcacacacataataaattatactcagaggtcctgagcttgggtttatttattcttctgctccgtgtatgaaatgtaaagtcctaggtcgtattattagttttctatgactgtataataaattaccactaaaacaaagtgcaattattatcttatggtatttatgggttgagagtcagagtccagcttcactgggtcctcagctcggggtctcaaggctgtaatcaaggtgcctgccagggctgggctccccactgaggcttcacaccctcgcctgagcatacacagttgttggtgggagtgatttccttgaagctgtagggctcctggtgagttgcttcttcatcagctgaagaatctcttaattttagcaccttttagcatcatctggtgaggctaaggattttcagaatcatcagatactggttcttttttgttcgatgttcttccctcaatttatctctttcctctcccgcttcactataaataacatgaagaaaccaggtgatacacttaacactttgtttggaaatagccttagctatgtgaccaacatcatcgcttacaagtcctgctctccatggacaatttcattaaactctctggcacacatgggaaggatcctccttgctccgatttcctggaacacctgtcacattcctttctgagttctccccggaggattcacctttagcatccctatttcctctagcagtctgttcatggtgatttgggctttctctgctgtgctactcaaaagtctcttagcctctactcgctgccaagtcccaaagttgtttccacattttaagttcagaaggtttccaacttacaatggtttggcttaggatttcataatgttacgaaagtgatatgggttcaatagaaactgtacttcaagtgcccatacaatcattctgtgctacattttcagtacaacattcaacgaattacatgagatactcaacacttgattataaaatcggctttgtgttagattattccgccctatcataggctactgtaagtgttctgagcgtgtttaaggtaagctaggccaagctgtgatgttcagtaggttaggtgcattaaatgcattttcaatttatgatgggtttgttggaacataaccccatctgaagttgaagaacatccactgtttgttagagtagcaccccattcctgataccaaatttagtaaaagtttaaccagagatgcagaaccagtcactttcatacaatatataatacatataagtatatgtacagttgtcccttgctatctgcaagggattggttcccggacccccacagatacccaaatcctcatgttctcgagtccccgatataaaatgctgtagtatttacatgcaacttatgcacatcaccctgtatcctttaaatcatctctagattacttgtgatatgtaatacagtataaatactatgcaaatagttgttatacggtattgttttttatttgtattttttaaattgtattgctattttttaattgattaatcttttgaatatttttggcctgcagttggttgaatccacaaatgcagaacctccagatacaaagggctgactatacatacatagtattttatattatatacacatgtatcacacacatatatatatggaaaggtatatatgtatacacacatctatattgatttactacaatgaattgccttatggaattactggggctagctaagcaagggcagacaggcaggaagggaggagcctacttaggctgaaaacccatgggcaagctgaagcttgttgtccacatgtggcagttggaaggaccacccgggtgatgggagagcagtcacagacacagctgctattgaagtctctgagtgtgaggaaagcctaagtttttaaaaaaaaatgccttccaactgcataagtcagacctgctcagaataaccttgcttttgattaatttaagctcaactgattaggggttctagtcacatttgtaaaatctccttccagcagcacctagactagcatttgatgggatagctaggaaggctgtgtgtgatgcttaggatggctactgcctcccttccatcctccagctctcatgagaatgcctcttgtagcccaccctgatcagacatgtgctaaaaaggaagtctaggaactgtcgttcagtctggccaagttgccacaccataaagccattgcaaagtgttaaggtggctcttgtgagctttttcactctcttctcccaggttccagttaggagagtggagagagcaggcagaggtcagagtacacatggtgaaaaaagagaaaagctgctcagcctcatgggtgtgcctgttggggtggagctcttgcaggtgtcaagactgatggttggaacaactgaatgatgagagtgggaggagaagggcagaaatacacagaaaaaccctatgttgtggttctgggcttcctggcaccttcagagctgtgtggctggggaagagagcctggaaaaacaccatcgtggccatccctctgtctccaggcaggaggtcttaaaaccattttatatttcactcatttgtttaattctctcctaaaatgctccacagcttctctagggttcccctcaccaccctgacaaataaataaatcattaagttgaacacagatgtatcagcatctactcaatctatagattttcagatctgtgctggacatttgctgtggacttctatttccagcatctatacatccagggaattattttctgtacccttcctaatgagattcatgcacatggcaaaactatgaaaattgtgacgttttatttgagtagtcattaaaagctgcttaaaaattgtcagaggctatatggataagcctctgtgtggataagactagcattttaagtaaattaagaaagaacgtattttgaagagctgaaataaatgattgcatattggtcatttttatccaaacccccaaaaaagaaaagaaaagatggtttaatagtacctgatagaagctcttggtgaaatgattagaatttgcaagaaatagtagtaaaaataatggaagtattgtctgaaatatttataaaaggagatttggtgactatggctgatttctttaagtattatatttctttttgctaattattcatacactgagatttgtataacaagccagggacagtacctatgtccctgggctcccccactaaacataatagccacttgacattcaaggagagcagattccagccaaagccccacagctgtgcatacatgacattccatatcatcttctcttgaggccatttaacttcttaccctaatgaataagaacttaggaccacaaaatgcaaatgtgggatgaaaaatgcagccgtagtcacacgtctttatttattgatgtgttgactcctaatccacttaaatctattttaaggcagcttaagagatgtccaatagctttgcacactaacatcaccccctgtgcctggctctgtgccatgcatttcccttactaactgatttacttctccaataccccctggataggcacttttattgatccattttatagttgatgaaactgagacacaaagagatcaactcacttgcctgtgttcacacagcaagtgagcagaggaagccggattccagtcttatacctaatcccacgcttgggctttcaactatgacctcaactgcctatagaagagatcattaaaatttaaaaataagtccataaattaaattatgacacatccatacaataaaatatttgcagctttaaaataattaaaagggagaattttatatattgatttgaaaaaatatgcaagatttattgataaatgaaaaaaataagttgcagaacgatgtgtatggcatgatatacttgtgggggaaggggagagaaacacataactgtctgtaaatacatgtgcacaatatgtatttctatacatgtgtatgcctaaaggttccctggaagggagagtgtctagaaacttctaaccatggttaccggtgggtgttgggagtgggagccaggagaatggaacagaaatgggagggagtcttttcaaacacgaccatttcataatgtttaaatgtatgaagcatataaatgcattacttactcaaaacataaattaatccattttaaatttcaagaagagaatgtaagaaagctgggtcaaagggagagtaaaggtggaaaagctagacaaagccagggctgaggtttgtccataccatggcgtgcgctgtgagctcccagctccgagctttcccacatccagtgagaaaacagacacacattcaaccaacagtcatggccatcccagatgcgtgcagaccagcggttcaggagaaacacaatttgctgacatagacatgtccgtgggtccaggggccacatcaaaatcacaggatgtgggtgccacaagggattgtagagataaccgaaggcagctcccctgcttgagaggtgagaagactcgggcccaggaggccaggtgacgttgtacaatcaaggaagctcttgctttcttgcaagctcagttcaccacctgatccaatcaacagtttaaggaatagagaggagatgctggctatgccctaactaaccatctcaatttcaggagggttggggctcccctgtggccccgcatcatttagcatgtccttcgctctctgcccgggatgggagagtttcacagtcacagaggaaccacaaagactctgcagaagatgagtcagcggctatgatacttttcacttcacaattaatacatcagacacctgccatcaacataaccattccagcttttatgcctgacatttctgggactattctttccagaggaactttctcttgagaattaatcagtattaacaaaaattgcaatgaaaggaaagagaaataagcactgggctaggtgctgtgggttgtctgattggtcctgctttggaagcaccctcattgtggctgggggagcatcaagacaccctgacaagctgtgatctgtgcttatgggccagtgaggcagatgacgggagctgttggactccactgtgctggctaaatcttttcaaactgctgaaaatccttattaaacatctaaagctttcaaaatcggaaaatgatccttgaatgtctccacacatcactgacatattcattagtggaaaatggggtcagacagcaatgtccagaggccagctgacccacggactgacagatagctgtgcagatgttgaataattacttcctacgagccctggtcaggactcacacttgcacgatccaagcagcagaaccactggcattagagtgcctggaaacagacctgcaggcgcaccaggaggaatccccctgcccgccacagagggcacctttccaggtaagagtctgcagctctgatgaatagtacttgtcaattaacacaccagtcacccatcaccactataatgaccccagcctcagcctccgtgccagacggtgcagggattctttggacttatctaccgcaaaatcacactgtaatgtttgtccattgctttgaagatcagagatggcctggagagactggtgatggaggaccgtattcacaaaccacagcagcttccaatcctctgtccaggagagcagaggggagcacccctgtgggacaaacaacaggggggcttgagtgtgagggctcgggagaataagtgccatcccccagtcaagatgaggactttcccaacactgaagacagacacagcagattacttcaaaaacctcagagcaagtttacagcaaatatctcagacataagaaaggtacaattaagggctaaattgcattctgccaacattcatatgtggaggtcctgacccctaacacctcagaatgtgaacttatttggagacagggtctttaaagaggtgactaagttcaaatgagggcattagagtgggccctgatccaatatgtctggtgtccttataagaagaaatgaggacacagacacacacagagggacagcctgtgaggaaacgaggagaagtacctgtctacaagccaaggagagaggcctcaagagagaccagcctcaatggtggcttgacctcagactcgcagcctccaggactatgagggcatctgtggctgtcgttgaagccgctcagctgtgggactttgttatggccgccccaggaaatgaacacagggacgtagtgatgcaacccccagatggcagctatgtccttttaagaaccagggagaattcaaacacatctgtttcatggtgtaagttactgtcaagaggctctcttaagtcaaagagaaaaatggaaatgtgaaaatgctaagctcttttctttctccttccgtcacccatgttcacagcataatcttgattgtatttcatttgaaagactagcaaaatgcactccgtttctctctgtaaacctcacagatgtcatcagttgatagcaaagccctactgtctgcagagcgagccgcagggaggctgtgggtgccctcgccttgccctcaggaaggggaaaccaaccaatatttcctgtgctaatgtggggctatgaattgtgcctcactgctctgagcatgttaatttgaagaggaaactgtcgattgttccaatgagactatctatattcttggtctacttaggatcaactcaagtgtgcatttcctatctaatggcatctgacagcttgagaagatgcaaagtaaattggcctggacctgccatagtttatagatggagacagggcaggtaatagtgtgagaagatcatgtgtaacgcagatgctgagatgcagaagaaaagatgcccttcctggctctggacgggtctcggtggaggagtgggagctactgctggttttatgagaatgtggggacttgagacctctatgggagaaatgcaaacatttgcaaatgggctggataaatagaaacatgccctgtgcatggctgagaacagtaaactgtggtggtgtgtcagttcctcccagagtggatcaaaggggatggtgtattagtcagggttccccacagacagagacagagacaaagacagagagacagagagtgaccgagagagaaagagagagagagatctagttgaaggaattggttcaagactgtgagcctggcaagtgcacaatttgcagggcaggctggcagatgggagaccctgggaagagttgaggttacagctcaagtccaaaggtggtctggaggcaggatttccccttcctcatgggaccccagttcgtttcctcttaaggccttcaactggttggatgagacccactcacagtgatgtgtcgagacattcaaggaccattttctgatttaaaaagctttaaatgtttttaataaggactttcagctatttaaaaagattgagccagcaccatggagtccaacagccccatcatctgaagggtggtctctgctttactcagcctagtgacttaaatgttaatctcattctaaaaaaataccttcacagtgacatctaaaataacatttgacccaatacctgggtactgtggcctagccacgttgacatgtaaaattacccatcatagacggtgatcattgtaataaaacaaacacatcatccacacttcctgagtcctgagcactttgcacacgctacttcattttgtgctcatgggaacctttctgctgaggttgtcccggacattctcaagtacatacatgaccagatgctgggtctccatggcaacaacatggtctcacttctgttcaagccgtgctttccttcccctgcaggatgtacaccttcagtctagccacagacctgaactccagaaaggatggtgaagccagcagcagatgcagcggggaatttcttccacaaacggcaaggagtcttagcagcttacaggccttgcaggtaatagaacattcccttttttcttttaagtaaactaagcaaaactacactttgtattaacttcacggtggacacagcttcgtaggtgtagcttttgttccatagacacatcctccctgccctagagcgtggtcagcaagggggcctcccaggtctgagggtgccgggggtcctgccctggtctgtctgctctgggcagacagggagccaccccttcatggcagagtgccccaccttgagctcctcaaggcagctgaatcccgagttctcatcccattccctcattcatgagccaagaggtccccaagacgtcacctgccccggtgccttggcccctcatcttttgaggcaaaactctccataacctgggggtcagcagactcaggccagggtccagggcacagcagggcaccccgagctggccaccctcatggggcacatccaggagtgcaggctgccaggcagggacaccaaggagcaggcagcccctccctgaacgcaaacaagtgacatcacatccctgatccctgtcctgtgatctgaagcttcacactccttacagaggagccctcaggaaggggctgtacctgctgctggcctttgtctggttgccacagtagtgaaaatgcctctctgtccttgttcttcccaaattcgtccgcctgtgccctgccatgtgccgcacacgttactttaggatctctcatccttgctatccccaatcgacacaggaggcgctattcctgccccctacccattttacagatctgaaaactggggctcatggaggctaggaagcttgtcggagagcacacagactcctaaccaccctcccatcagattgttggaaggattatgtgagatgggccatccagtgcccaccacggccaggcccctggtgcggagaaactattgtgcccagagggtggggtcacagtagccaggcttattccctagtccccagggcccatcctggtgcctggtccataaatctccagaacaaccaaaggaaggctctgccgggacttgtcagtggctcaccctaaggtcaacgctcaccctctgttacggattgaattgtgtgcctccaaaattcctatctcgaagtcctaacccccagtctcactgaatgtgattgtatttgtagacaaggcctttaaagaggtatttaaggttaaatgaggcaacacaggtgatgcaatctgatccaatctgactgctgcccttataagaagaggggatgaggaaacagacacacaagagggatggccctgtgaggacacagggaggggacaccaccggcaagccccagagagaggcctcaaaaggaaccagccctggcaacaccatcatctctgacctccagcctccaggactgtgggagagtaaacttctgctgtggaagctaaacagtcaacccacacgcagcgtccctgtcgccatttgcacctcctggcagctggtgcaaatcagcccaaagctaagtggccttggcaggtctttgcagccttggtggctaggtgaggaggccttttcttgagaaatcaagaatgtgtctctgaagctgggtccatgagaaatggcgatcagcgttcaccatgtgagaaaggcccagacttgggagagccgagactccccagggctgtggcctggggattatttaaaaagctttaaatgtttttaataaggactttcagctatttaaaaagattgagctagtaccatggattccaacaaccctatcatctggagtaaaacagagaccattctgttttactcagcctagtgacttaaatgttaatctcatttttaaaaaataccttcacagtgacatctaaaataacatttgacccaatacctgggtactgtggagaagtacccaggtattgggtagggggagagcctggaatggaagtctctgctcgtagctcagcctgtgtctaaaccgtgctttcaatggctgaaaacagaacatgcatctgcctgtgaactggcccccctcacacggtcttctctatagggatttcaccccttccctacagtaagaaaagacaactggccacaggtctggtagaatcatggccccagagatgatgccctaatcccgggaacttgtgcatgtgaccttattaggaaagagagtttctgcagatgggattgagtggagggtcttgaaatgaggaaatgatcctgggtcatccaggagggccctaaaccccatcacaagtgtgctgatgagagaaaagcagaggggatctgatacagcagcagaggaggccatgcagccagagaggcagagactggagcaatgtggccacaagccaaggaacacctggggccaccaggagctggaagaagcaaagaataaattctcccctagaatgtcagagggagcatggccctgccaacaccttgactttggacttccagcctccagagctgtgagagaataaatgtctcttgcttggcaccgcccagcctgttatggcagccccaggacaccaatgcagcaccttctgtctagagaattggtgcagccctgcctcattccatagatcccaggggtcagtccattccactccccacagggctttcttttgctttatcatcatattcctgtggcaaagctccacagaagaacatttaaaatgctctgagctcttccaggaagaaaataccccaaatccaaaacttcagcccgcaagttgaaaacttcagggactttgttactaggcagaatgagtttccaagagcatgcatgctttgcaatctacttgcagatcagctctctacagctctctaggatgttttaatattcattctgggataggggcggtgggtgctgcctcttggtgtcagtgtaggcaacctctgcataaccacacttcacatgcaagagagcaagacagcaagacaaaccttcccctgaagctgttccccaggagatgcatgtttctatcctgaaacaaacaactgaagttttccaataagggaaagcaatactattcacttggccttaccgtatatccgttttgaagactcagcccagtgaccctaagaaagtgtttgcatggtgactgcaaacgttctcactggctcaccaatcccatagtttatgcacctaccaaatgtagccagggccaccgagaactgtctggtcctgataaatttcagcagctggaaattctgcatcgtccgggccagcgtggacttcacaagggatccacaggatctggcaggagctgcccgtggtgctgaccccgagaatgctttcaaggcaggtgaaattggcccccaccctactttctggtgtcccttccttcccagtagtttccaatcacttccctaggtacagggacaccacgggggaccactcttgccagagcgagtggccagttagtgcagacccttgagactggatcactgttcacagaagaaagtccagacaggaatgatcagctgcactggccaggtggaaaatgagtcccttcctccctgagggtgtttggatgttaaagccatttgcattttcctctctaggatttggagggaatcagggcgatgctggggctggtgtatgagggtttatgcagacaaggcttacctctcctcacctctcttccttaccctgctcagtaggaaaacacacacaagagctgccctctcattttagcccagagagagctgtgtggccaagagggagcagggcagggatagtgcctgtctgagctgcctcctgcccaggggtcctccctaccccgtccatccctggtcgcctgggctccaggcaggatttggtccccagaaggccccacagcccacctcccgtggcaggccgtgttcgctctgcccccaccatctctgttaatgactcatctttccatgttcatcccttggcccagggagacctgcagctccctaaagcagggatgctgtggactgcagcttcatggaccagcatgtgacatgctcccccctgcggtgccatgtcacagggaggttgaggcatgagtcctgggtgccagagggcagcaccactgggcctgtgttgctgcagggttccccacctcttgctctgaaatggacccccctggatagcctgggcctggctctggggctgggaatgtaggtgaagggccgatgtcagctggcacattagtgccctccagggaagcagccgagcctggtgtctccctccagggtcctggtgcagggcttatgctccacgcagctgtcctggtggcctctagctggctcggcccctagcactctgctctctggtcccagggggggcatcctcagctctcattcactctcttcatctcatttgctgtgggttcctctcaaggccagtccctcaacttgatcagccctgcacagcatggggagaagggtggcctagcccctgaggacagagccccccacaacaccatcccacacagtggaggcccctcccaaagggtagccagcctcgctgccccaagcatgacctttgggctacttccccaaagcacaggctccccagaaagagggcgggcgtgagccctgtaactgcaaggctccaaggccatcctgcggctgcctgaggctggggaggaaggtgccagagagctgctgtccctggctcgaagctgctggccaccgccaaggccagtctcatgccgagaagaagtaaataaactataaagtactgttttcctttagcattcagccaaacagagaatgaccagctatgggaaaacagcaaggggatggatgagggcttctccccttggtgctcagaagcagaattcatacctgggagccataaaaggacggcccctcaacaggtcaacaccagggcagtcctggagggtttctcagaagaagtgtgccagcaagagaggagactagatatatagataggtaatctatactataacaatacatattataatatagatagggataatgtcctaagacgtctctatgggaatgataaggacttagaaaagacagaaaagtagaaaaacggatgtgtcatgataggggccaatcctgtctcttttcattttcttgatgttagaatgcccagaaaataaaacattggaagaaattgaagagattgtcaatttcatgtcctctttcattctaatgatttgggcaaaatgggctgagctattgactaacgaaggaaaagattccctcgcagttgctgggtgactgggagagctgccattggtgcaagtccagtgagttggatgttaaactgcatgtgccttgcttcctgccccaccccccaggctaccgttgcaaggaagagcgtgctggtggttcgccacggggagagagtggatcagatcttcgggaaggcatggctgcagcaatgctccactcctgatggtaggtcacactcaggcgggtctacggacagaaacactgtagatctaaccaatgagatctccttcttaatgaccttacatggcaccagatcccctgaggcaccattctgtagaatgaccatgtgtagactgtatgtgtggaaaacgtgcctgctacatcttcctccaggggtgttccatgtatgcatttgagtgtctgtgttggaacctctccaacctaatcttaactgatgtaatttttggctatgctgcttaacagatggacgtattcttgaacatgcctcttgcacaccccagcttttctcctctgaatgccaggaagtaagaatagtgcttataaatacacatacccacaagccaacctctgtattgatgatcaatgtccacatcaatgctaatctcctaataggaagcctgtagtgtcacaatttctaagccatgacccattacataaattaaggcattgaatgtagtgacaaaatcaattcacagttgctaggttagccgaacccttttgggatccccctccagaagcccagcagacccaagaaagtggtaaatgagtagggaaaaccattggcagatgacaatcacacaccagaaaagattctgagcagataacatcatgatcaagcatatttccaagaactcacagagctaataatatggtcacctctataaaacaagatcaagtaaagatacaagagcttaaagcaacaataagacaataggtggctatcaggatgcattaacaaacatataagaaactttttttcaataaaacagtttttttagctattgaattactgaagctatagattgaactgacacaccttgtccatggtggggagaaccaatacaaaacaatcaacaccaaaaatagttattgaacttcatagaaaaagaaaaaatatttggtcatctggacaaaagatcaagtcacttataagggaaaatattttaaaggcactggaaatccccatctgaaaggaaactcctggtggatcttttcccaaggtagagaggcccttgataaagtgaagaattacatctagtttgtctgaattttgtatattgcagggtttaataaatcacaaggaggtatagccacgtcctcccccaaggtgaccaacctcagggaacacaagggagatttggggggctctactggcctctccccagctcagctcacttttggcccaggcacccacatcctcacagggcccctcacctcaccccatattccacacagactctgctcccatcaggacctgaccttgccccacatccttgtcctctcctgagctctgccctctgcccccagagtgatcacagctgaagtgtcaatgacagcaaaatacctaaatggagtgtcttgacattttagagggggatcacagatgcctttgagaacacaatgaaattgatggactttctctctgattttaaaactgcctttcccaagagctaatgttggcattgaataaacacctctaaaatgcagtgttcaaacaagagtctctgcccatggaaatcccagggagggagtcttcagaaaactcctatatggaaactaaaatgcaggcatgaaaaattgccccccgctgacccctgctgccccccactgccccctgactctgggtttgtgcaaggctgtgggccaggatgaaggggcctggcatattctggggtgcaaagggcagggcctgctatgtatggcagagcaggtctcaggaaggtcagtgtggctgctggaacctcctaataaccaggaggcttggggtccctttggagaatgtgaaggcaaaccagagtgcactggagggagcagtgtgtcgtggtgtcctgtgtgaggataatcagtcatcctgacgtggtgacatgagaccagtgccccgactcgttgaccactccctcttgagtcagactctgggctatgggtgttacctcactgacacctcgcaatcgctactctttccctgttttttactgataagagagatgaagtcatttatttctggctgcacagtgaggagatggtgatgccaggatttgctaccagactgtcagatcttagaactcaaggtcaaactccacgtgaaccctggcaccgggcagcctctggtgggagacagtcccagtgagcccacttccagcctggcttcaagcaattgactaaagaatgcacaacacaggcatctccagctcaagcactctgtcccctgagcaagaaggatacgtttaaagctagggggatggatcattgatgccaacttcagattcttaccgagttacactaaactagtcatagagacactttatcaggttcttcatcaggaaaatgtaagagtgaatcttcatggggcattttgggaggacaaagagggttgcatagttcctggggctgaaacctaagttgtctgcatttgagaaaatgttgtgtgcacagctgagcagcactttcttctcaaattgaagccacgttgcagagaatgttcagaaacaacacagttgacaataatttcaataataacattgctgttagagtgggtcttggtcttgggagttttgtggaacaaatctgtactaacttgatgaaactgaacgtctgatgcttatttatacttcagggaaatactacaggccagacctgaatttcccctgcagtctgccaagacggagtcgtgggatcaaagactttgaaaacgatcccccattatcatcgtgtggcattttccagtccagaattgcaggtatgtttgaggactgtctagtaggaaaggtaacaataacagcaacactgattatggctagcaggcatccagcctgagccctagctacacaccctttgatacagtgttagctttgtctccagtctgctgaggaggctggggcacagagaggttaagcaacttgcccaaggtcacacagcaagaaagtggcaatgtagaggtttgatctaggaatggatgattcaggaagttggcaggaatgaaagaaaggcatggaaagaacaagagaggggaggaaaaatcaacaaccaaggagctccaaggagctcacttttcaaatggaaaaccacatcctctcattcgttggttttatttcaaaatctgtcactttgggcttttgtttcatgtctggcggttctgcttctacgtgactgagtttatgtaaacagaagagaccattgagttcatcgagtcttcatttcctaaattcagaaaatggaatccagagaagcaagttacaccaatggttaactgcagagacccccacggcccactcgcccagggccccactcagaggtgtgctcagaaatgtttacccacctgctccaggcagggtgggaagtccgagttatagagttatagagttagttatagagttatagagtcatggagttatagagttagttatagagttagaatcatagagttatagagtcatagagttatagagttagagttatggagttatagagttatagagttgttatagagttatagaattatagagttagttatagagttatagagtcatagatttatagagttatagagttagttatagagttatagagtcatagatttatagagttatagagttagttatagagttatagagtcatagatttatagagttatagagttagttatagagttatagagtcatagagttgtagagttatagagttatagagttatggagccatagagttatagagtcatagagttatagagttagttatagagttatagagtcatagaattatagagttagttatagagttatagagtcatagagttatagagttatagagtcataaaattatagagttagagttacagagtcatagatttatagagttaattatagagttagagtcatagagttatagagttatagagtcatagtgttacagagttatagagttaattatagagttatagagctatagagtcatagagttatagagttagttatagagttatagagctatagagtcatagagttatagaattagagttatagagttataaagtcatagagtcatagagttatagagttagttatagagctatagagttagagtcatagagttatagcacttgctgagtgcagtggtgagaatactgcactccccgacaactgattccagactcccagtgtgagctcccaggacactgagtcgggaggagatggtggtcccaggcctctgtccctggcttgcaggtgacattttctgtcttcctcttctcttctctgcatgtctctgtgcacagatttccccttttagaagggcactgtcacactggattagagcccaccctaatttaattgattgaggtgcatacccttattttaacttatcactctgtaaaaatcctgtttccaaatgagtcacattctaaggcaccaagggtgaggactctaacatgtttttcaagggaggggatacagttcaacccagaagagcctccactgaaacctcgctcatcagctttcaggctgtgcaatttttgtgctgtagggactcccatatttccctgagagcagggcttccagtatcacagggggaaaggcagagtacaggcttttccttccacgagcttcagtgggtcttgagttttctcaaacgaccacaaatgtgaagccccgcccatttctgagctcacagtggtgcagatccaaagcccaggcccacgaggctgcttctctgctgaaggtcttaaagcctgaagtcaaggtctctgctgggctgagttttcattgggagctcaagtctccttccagactcattctgctgttggccaaattcagatccttgcagtgggaggactgaggtctgttccttgctggctgttagctgggggctgctcccagccctagtagaggctgcccacattccttgccatgtggtcccctccatctttgcagccagcaatggagaatgttttgctgaatccttctcacttcacacttctctgacttttttccatgactggctggagataatcactgcttttaatgggctcaccaacttgtcagccccaccttggatcccttcccttctgccataggatgtaattgtcccaggagcaacagatcattctggtcatgggttccacccatacttggaggctgtgcagggtgtgtcacaccagggggtggaaacccggggccctttgaggaccctgcctaccacagggagcacatggctcatctgccatcagaggctagaattatgaaggggcattttctgcctttttcactattttccaggggacgcgctactggacagtggtatcagaatcagctctgtgtttgcctccccagccctccgctgtgtgcagacggccaaactcatcctggaaggtcagtgagaacctcggtgagcctctcctactgccttgaccttggggctattctccaaggggagtgggaagggagtggaggtggaattggatgactggcaatgaatgcccacaccaaagtcatcaggcaagtacgagccagccctccaaggatgctggcaggcatgctgggtccgtgagcgtgtctggaataccaggaccgtcagaccagtaggggctggtgtagctaaatgccagggcctgtcctcataccgtttctctttggcctccgtcagctaggcatttttaaaatacacctggaaagcggcattcgaaaaccttgagagctgggaactgctacggttccttgtaagtctgaattgcatgacccttcccagggcaatgcactgggccagtggagctgtccagcgtcctcaagggctgatgtgtgtcaggaagtcctgggcagacccttctgcagctcccatctacgggaagaagaaagttcctgcccataggagagcagcttgttccagaggcctgggctctgccttcagcctgaaccctgtcctgctcctctttgtctgggaagagggataagatctcggtccccaggcagggactggccgtggccaggagcatgggtgacatgcgagagagcatgtcgcctccatggtgacaagggagagggcagagcacacagacacagatgcagcaggagggcaaatgtgggggacagggcttgcctcgactttctcagagacctaggaagtaaggccaccagcggaaagtgggggcagggactgtgggaagtttggggtgcgccgaaggaatgaatggctgtcaggcagaggggcccaggacatgggctgggagatgcagagtgaccgctgggcagcactcagagcccacccacagttcatgagcatgagtttaaatggagatgcatcagccgggctagggggtctcttccagcttagaccgggagtaggtggagagtgggatgcaggtaagggcagggttgagctgtgagtacggtggagccagaggggacaggaagacttgagggcatagtgagggggtgaccgtgcccatggactttcagctgggtcagcgaggaggccgagcacgggggaggtgagtgcaggagaaaggaggtgatctgagtgaggctcaaggtccacgagggggctgcttggagacagcagagtttggcactgcaccatggcggggctgcagtggctagaatgacaagtcccaggtggaaggaatggatgctcaaggcagggaggaagccacgtcctgcaggaggtgggcaggaatggaggggccatggaggagccatcccgcagatggtggtcttgctgggacttgcacatggggccacatcagagccggggccacgaggggccgggaccttcacaggaggagccgttgggacagcagtggattcaatgcacacatgtgcattgccggttcccatgtcctcagatccccttcgccccgtcagagacgctccctcagagcaccttcaaatccaggtgcccaggaagccccagccaggagcggacctggttccaccccggagcctctcaggctcatcattcctgtcctgtgctctcatgaactttccatcccatagtccagtcctagtttcacgaggcacagaaatccattgtatcagcatggagcatccacgatccaccttccacacacttaaaaatgtcaagacactttctgcccacctcagtcttgcagcttcatcctttcatttcccacccaactgtggcacaggaccccacccctctgcacggcatctcgggtcacaagacagaaatgcagacttacttcactttgccttggaggttcccatgttgattgcatcacggcacctctgggctctcaatgagccagatgaagatcaaagaacaatatcagcttctttgaccaaaccacgaaaggactcgcgaatccccaaaggcctgacggcagtgtagccggaggccagaggcagctccacccgagggcaagcaaggcttccacaatccttgtctctcctcacaacgctggcatgcacatacacagcacacacatccacacacaccacacacacaccacacgccacacacacactacacacacccacacacacaccatgcacacccacacaccacacacacccacacacaccacacacacccacacacactacacatacacaccacacaccacacacacaccacacaccacacacaccacctacacccacacacacccacacacaacacacaacacacacaccacacacataacatacaacacgctgaacacacataccacacacacaccacacacctcacacacaccacacacatacacacaccacacacacgacacacaccacacatccacacacacaccacaccccacacacacccacacaccacacacacaacacacacccacacacacaccacacacaccacatacaccccttggggtttcacttgggggctgagtcacagaccgcagaggaggaggctgtgatctttgagagccatgaccccagcccaggtgacagggtcccgcgatgtccgcctctccctgttcccatgctcacagcagcaggtccagccttcgtgttttcaggaaggcctgagaaacaggacgtggcctttccagctctgcgctttgggagggacgagggtggcaagatcagaaatgtgaaggggcagggtctccgagtatctggggacccttcagtgtgagggtggctcttaataactatgatggaataaagcaaaattgatatatagcaatttcatccctggttgtttaggatcaatgtatttataattaaccaaacacctataatcataagatgtgaaccaagcaagaaatgcacacaaatatatgacaagaggggaacaggcctgtgcctcagtttcccctcttctcccctgtcgctggtctttgcaccccaccactcaatgagcgcattttgttggaaaccacctaagatgctgctgttcttccactaagtttcagaatcactttggtttctgccactggctggccgcccactagcaggccgtgcgagagtccccaggtcgcctgtgcctgccaggccagcaacaacagtctcctctcactggggcttttactgcctcagcctgcaagtttcccttctagtgaaaaccttcgtctttctttccctacccaacctctctcaccacgataacaacaacgaataaaaaaggaatctcttggccagcctttgtaataaaagaatacgactgactgaaaacacttcataattttatcttttttttgtcattgttcgtggttcctcattaacacacttattcccatttttggtggatttttttacttctattatttgggtcacttgcatataaaaagctttcaaaaatgtcttttgccagcaataatgtcaaaatctttaatgtgatctctcagtgacctttaagtgcagatgatgatgatggtgatgatgatggtgatgatgcctgtttaaagggcatgggtttataaatcctctgttaattcagaaaaacaaggacacccagtcttctttacaaggcctcagacatgatcaacctgcttatcagatggtgtctgagatgctaaggtgctcaactttgtttaaattcaatgtcagagaatgtccacatgaaccatttcacagccaagtccacaaaacactggcctgcaagaggtcttcaaaggaaagagacccatggccacacctgtctgggaagctctcacactgttccttcatcttatttgttcacaatggaaatgagctcttcacaggcttgggggagatttcgggggcctggtttatcagggaggacttgggggcccagttgatgggggaggactcggggacctggttgatggaggaggacttgggggcctggttgatgaaggaggactcgggggcctggttgatgggggaggactcaggggcctggttgatggaggaggactcgggggcctggttggatgggggaggactcgggagcctggttgatgggggaggactcgggggcctggttgatgggggaggacttggaggtctggttgatgaaggaggacttgggggcctggttgattggggagaacttgggggcctgattaacttgctttaactctcttttctaagcatgcttgatgaaagagctccttccatggacctaaaacacatttgaggaactgattttatgtccagcatttgagttcaatgacatcttctccattcccagtgaaaacattcaggtctttttttccactcaaaaagagatggccttactttatggctcttcctttaatcaaaatataaaatgcttgggaaatgtgagttgcagggagtcagaatattccagaagatggctccttccattcttcacctcttgccccgtctgtgtaagtgtttatcaggaaagtgcctcatgaggccaacattcttcatgatgggtcacatcttgtccattgatcattggatctgccatgttggaggatgcagccggtgggctggtttcacggtggagctgtgctgggtgatcaggtgagccccagcctaagcctgctgcctgggacactcaccagctcctggaagactctggcccttcctggcacacagggggccatcactcctctgataccttcccactgctcgtcagttttgacttcagaaatagcacagctatgcctaatcacagaacggtatttgccaagaagaaaatcacactgtttaaaaggcatgatttagacgtgtgtgtgacggtctgagatctaaaaggagacttatttatgcaaagtcagggtggatgttgaggatgataaacacttgtattctgttgaatccagaactcaaactggagaaaaaaatcaagatacgagtggaacctggaatctttgaatggacaaaatgggaagctggcaaaaccaccccaaccctcatgagcctggaagagctgaaagaggcaaatttcaacattgacactgattacaggtatgctgttctaaagttctctgccactggggcttttccagttattgttaaagaaaaatttcatgacactgttaaaatggtaagaaagactttattcaagagggaccactgcagtggggttttgcagcaggggagagaggtggggctcaactcctaatacaaggaaaagaggggagttatagccacagagcagggtgggggtcagtggatggaaaattcctgagaaggtgggtcattcttgctaaactgacctaaatggagactcttgctgaaggcaggccaaggtgatcagacatcacctggggggtggtagaggataaggaacttgatcagatgtcgaaggtaggaggttcttgctaaactcactctgcaagaacagacacagaagcccaagggtcaagacctcattgagaagaaggttcagaggagctggactggagtttagtcaaggagagagtctttgtcattctccacccatgtctgactctgccatcacagagccctcctggtgttgagtaagaatgtgtgctggagattgactgtcagtgctttgccagttttcagcacaaaactggagcctgcctgttgaccatgagcctgccttgaggcagagccatcctggaagaacgttctccttccccagctaactgcagctgagccttcctaatccctacgaaagtgccagggcagcagcctctccttctcatccttccaggcccgcgtttcccctgtccgccctcatgccggccgagagctaccaggagtacatggacaggtgcacggcgagcatggtgcaaatcgtcaacacctgtccacaggacagtaagtgcctcaccatcctcagtatgaacagcccctggggcttggggaattatctctgagatggaaattggccaattttctgaacctatgaatgcccctacttctcctgcctgcccccgcccccattctccagcaacaaagttttcatcactgctgctgctgctgcagtaaccgggtgcacagacacacactcccctgccgcccaggccctgggaccccccatcctgggactgagtgctgatgggaggggaatgatctctgagatggaaattggccgattttctgaacctatgaatgcccccacttcccctgcccgccccccaccattctccagcaacaaagttttcatcactgctgctgctggtgcagtaaccgggtgcacagacacacactcccctgccgcccaggccttggaaccccccatcctgggactgaatgctgatgggacccaggccagcagggtcagcacaatccacccatgtccaagggatttgagtcagcttcctgggaaacaaaagagacagagagagaaagaacaaccaacttccaggtggcgcccccttccctgacccatcacacgggtctcctaaccctcccgtgttgctttgtcctggatgaagcatgcacagaagcgctgacttcccacgccttcccctgagctggcagggacaagcgtgtctcctgagggagacccactcggcctgtggtctccaggtgttcttatctaaagcaggagtcgtagcaggctcgtgtgacaaaataaccggctgacctttctaaagtgaatcaggtctggcttgggcgtcagccaccgctacatcccagtctgtggctgacggggcccaggcagccagcgaccacagggggtggctcagctcacttcctaggcctccctgaggctggtgggcagctgctgcgtgcagaggaatccatgagcgagggtgggacgcaggcatcactgagcggttaccagccacactacttctagcccaggggtctcgccaggcttcggggcactctgagatagctctgccccccaccactttggggaccccagtctaataaaaggtgctctctggggctgctttgacctggaggtgttcttgttttccacagcgggtgtcatcctaattgtgagtcacggctccactctggactcctgcacgcggccactgctcgggctgccgccccgggaatgtggggattttgcccaactcgtgagaaaggtacgcgcccactcttggctctttgggccacaaaatcaagcatcccgaagacacaggtttatctcatccacttctcggaatgaaaacaagtgtccggctgacccagggccaccaggatccacgtgcccccggagactgtgcccaccggctcttatgcgaagggtgacttcgggctggggctggtggataggtcagtcaacctcatcatcattggccacttgccaactttttaccagtcagctcatgccatgaccccttgcagctctcgtagaaaaacagacggtccaggaaggagtaagcagtttagatgaggagggaagaaacgactgtgggactcgattctggcctcttctggggacctggggcagggcggctgatggatgaaaaggagccccttgatcctcttgcccttggagtcacccagcatggaagaagcttgagctggttgtagctgccagagtgctcaggctctggcaagggccttgtgaatgacaaacagaggataacgcacacgtgacatcttggacaaccttgattatcactcagcaaagccagagggtgatgtccagtccatgggtgaattgaggcaggcaaactcaggagtgcagatcccaccccagtcccagcccttccctgcagatctactcaaggctggactcaccacagtcctgacctttttatgaaattcatcagtccactggtcagtgcccaggcagcacgtgcagcatagacaatgcctgtcatcggaggtgcttgaggccctgacctggtttcttcacatagcactgccacaggaccacactggccacagcttgtttgccataagttgtgggcagcagtgggggttgctgagtccccccaagaggtcaggggcttcagaggagcccaactcccgggcccagcccagtgacaccagccaggtgcctgcaggagggcttagctctctagctacgcctgcctcagcagccagatgagaggttacgcacatgaagagcatgcctgccgtgggtcattgtcactcagcaattaggcatcagacacccgaatctccctttcttgctccattttcctctgcacctgagtagaaacatgcttcccctgcaaaatgtctccagggtggtgtgtcccaattatgatccagacatttccgagcgccctggattcttgagccaccaggtgagcattgtccaaatagggcagctcaacccccctgggccacactggtagaggtctgcatggattttcctggggactgtccggggcagccccggcaccacctgctcccaaaatgttgctcttgcttctgcaaatgggtctcccacacatgcgctctgatgcattcctcctgtccctgccccgcttcccacagtcccatatacacataccaagcctccagccccaggcgctcctggggatccacgtaaccaagggtggcagcactgcacacaccagctgctgacagttcctcaaacccatgagcctttgtggccaaagctccacccactccttggacccttcacccccttccatagatgccaatcttgaacttccaaactcctggactttcttatgctggtcacgtggcgttcaccctgcccctaccccaaaataagctggacttgctcatgcatatcagaaaatacaaagggggggctctaccaaatgatgggcccccaaatcagggcagctggaaagggagcactcaggaccctccccgaccagcccatcaccgcccctcgcccacagcctctacaagcgtgaggaaagaatcaccctagggtcaacaccagcctcactcagacccccctgccagttggcatttttgtaaatttcatctgcctgaggaatttctagacattagaaagaggaaggaaagaaagaaaagaaaagacaaaaacaaaaaaggcttcaccacaaagctctgttctcacacatccatttcacagatgaagggatggaggtctaaaggttcactttgtgcttttcttttgggtctgaaaactcaatgtctgtgtctttttgtgatgctgaatatgagaatatgagtcactccttaagtggtggatggcaatctccacctcagcctgcagacctttgtggtgggggctgttctactcattgtaggatgtaccaccttgtaggacctctacctgctaggtgtcggcagcacctccatcctcagttgtgacaatcagaaatgtctccggaattacccagtgtcccctggctaggggacatcccccacggggcaccgccagggcagatgttggtgccattcaatggtggcagtgccagcctgggcagtcgcagaccctccaaagtagaggtgtgcctgacagttggctttggagctagtctgaaattgatggacttgctataagatattaacaagtgatttaaaactctgttccagatcccttccctgggcatgtgcttctgtgaagaaaataaagaggaaggaaaatgggagttggtgaacccaccggtgaagaccctgacccacggggcgaacgcagcatttaactggaggaactggatctcaggcaactgagagccacggtgatgttgtcataacctcagagtggagaggcagaaaccatgtgcagaggctgggagatgctgctgtttccagaggcgtcttagtctcacccaatgtgatttgtagaagcacgagacgcacttttatatcccggaatatttccctccggctttcgcctttgtaactcccatctgtggacccatcgtccaccagcccagctgcggggagcacagggcaggtggctgggtgaggatgccgccctgcagcatgtacaccgagtgtctgcagctggggacacaactgcccgggactctaacttccaggaattaaagactcaccacacacgaaggatctaaccacttcattttccatggtctaatcattaaattcccaatcgttttttctttttctgggtccatcactctttagccatatccacatgggctaaaacaggtgtaatagtcaataaaatggtcccagaaaaccatcgaccaggtcaaaactgggttgctgctccgtgctgtcaacattcatgttactatgtctctgtggttgctgtaaccaatgaccacaaacctgggggtcatggaaagaacacaaactttacacacacacacacacacacacacacacaggcacatacacacatgcacatatgcatacaaagacaggcacacacgagcatgcacacacacaaacacgtgcacatacacatgcgcacacacatgcacacgcacatgcacacacacgcaggtacacaagcatgcaaacacacatacacatacaaacgcgtgcatgcatacatgcacacatgagcacacaaacacatgcacacacttgcacacatgcacacaaaggcatacacatgcaatgcacacacacaaacacacatgcacacacaggcacacacacgctcacatgcacacacacacacgctgactctcctacggttctggaggttggcattttctcagcaggctatgtttcttctggagcctccaggggaggatccttgccttttctcacttttagaggccacctgcatcctccctcctcaagtacagcggcgtagcagcctccaagctctctcagtctctgccttcacagccacatcgccttctgcttctgactctcctgcctccctcctacaagggcccttgtgttgacactgggcccacccaataacccaggatcaattctcatctcaagagccttaaccacacatgcaaagtcccttttgccacataaagttgcatattcccaggtcccggggattaggacatgaacatctttgggggttatcctgtagcctgccataacataccccaatccttccaagcacagcggagctgcccgtacagggcctcggacatagggatttgagacactccccttgcaggccttttttggcttctcctattcttgtttctgatcacgtagaggagagaagaggactttgccagtgggagaagtaggctcccccgatttaatggggccccaaaagaagggccacgagcaaagtggagtctgtccatgatggtgatgctgaggaagctggtccagcaggggatggggtctccccagtggggagtctcatgccccagcccacaggtcacacctgctcccacagcccacacatgtggtgcctcatgctgcaggcagagatcccagcacggtgtagtgacagtccatcggtctttcatctcttctagccccctgatccagtgcaggtgttatttcatgattgcagtttggggctgtggtggtggctctgtgagtgccttttatagtgtgaatgcagagacagggcaggaaggacccatgctgcaccctcagcctcccctgtgagcacccaggcaagtggagggcagaacacaaagggagctcttgtagaaataaagatggtgaacaccccgggctgtgacaaaaacggcccacattgtgtagaatgcacaggaggccagacccaataaaagtttccttgctgttttagtcaatcaaacacgacctcctgagaaaaagacgcatctgtctgtcccttgttttatttcactaatgatgtagtttttctgtgtccaaacataaagaagtttgaagttgacacagccacagagagcagagcatgcaccccactcacaggcctgcttcgagtccaggccataccgaaatgacgtcttcagggagattgttctagacgcatcccagcagataccgactagagaagagatggattcactgggatgtaggtggctgggcagtacgtcctgcaacaaatacaccccaccgctgggcacctgggtggttgttctttctcctcggcaagtgtgtggttgggtccaagtccctcctggataccacagtgccacgctcgctaatcatgatgatgaattaaagtgctgcaagtcaaggtatggcattgaaatcacagtcacgtgttcaggtggtctgtaatgaatctctggattcaccttctcaggggtgaagcttccaggtcctccaccctgggcaaagccagacacaggtaattcccctctcatcctgctgggctgctcacaggttttgcaaggagaatgagatgggtttgaaactcagatctccagatctccagatctagtgtgcaagaaatagcattttctcgatattctatgcttctggttctgtcagaccctcattccacccccaaggcagaggaccccagttcagtggttctgttcctccagaaggaaccattcgctgtatggactgagccttgcggacagagctgggctggaaaagggcagagacggaaatgcctggtgggattatcatgattgggtgtaaactgtctactctatgaaccaataggaaatcccaaaaaaagaaaacaaaagacactcttttttccttcctctccctgggtgggtcgctttggtgtttgtgagccaagtctgacccctgctgacaccgtctggaagtggacgtcctgtcaccaacgccatcccaacccatgccccacccacattctcttgttgacttcctcactgtgtgcttgaaaaaaaaaacaagcctgggccaggcatggtgactcatgcctgtaatcctggcactttgggaggccaaggcgggcagatcacgaggccaggagatcgacaccaccctggccaacatggtgaaaccccgtctctactacaatacaaaaacgtagccaggcgtggtggcgcatacctgtagttccagctactcaggaggctgaggcaggggaatcgcttgaaccagggaggcggaggttggagcaagccgagatcgcgccactgcactccagcctggcgacagagcaagactccgtctcaaaaaaaaaaaaaaagaaaaagaaaaaaacaagcctgaaagggaattctaccagcgttccctgaggctgagcggatgacaatgttgttttgcagcttaatgttcccctccgagacctggttctttggaaagatggaaagtggtgagaagggggcggagccggcctcaagctgggcagccaagggggccaaaggcctaagccagtgcctgtctccaggctgcagcctgtggtgctgaagagcttaaggacaggcctgggaccaccaagccaagcactggccctggcaaacactgctgcactcgtctaagaagaaagagctatcataaccgtccaccaaagtacatcttattttagaaccaaatttgagacttttttaaacgtgattcatattggtgcatattatgggctgagttgaatgctccctcccccacccaaattcaaccagccaacaattctgcaaggatcagaagtcggaagaaaggaaaatggcagcatcgaatgcacagccacaaatcccaagaaggccccaggagcctgggagtggctgcggaggaatttagggctggatggcccacaggacatggtgagaaccactaccatgggctgaattgtgtccccctgaaaagctatgttggagactgatatggtttggttctgtgtccccacccaaatctcatgttgaattgtaatccccagtgttgggggagggaccctaaccctaaccctataaacatggtattttttatatcctcatatcctcataccatatttaaacctatggtaagcacctgctcttccacaggaacagcagataactggaaatcttagaggccttcccagaactggggttcatcagaacatgggtggctcctgacccatcactcccagacccagagcttatgcaccataggggagaggtggttcagaagggatgtgcaggacaactaaagtacagtaacatcgaggtcgcttgacctgagggcaggacctatggtaagtacctgcttttatgtaggtatatacagtaaagggagcagtcatagcagtgggggaaggaaggtgattaaataaatgacactgggacaactggatcacatttggggaaaagaaggttggaatcactcctcattcctcataccaaaaaaaaacatcaaagatttaaatatttaaaaaaaaagaaatcatgggccgggcgcagtggctcacgcctataatcccagcacttgggaggccaaggcaggtggatcacttgaggtcaggagttcgagaccagcctggccaatgtggtgaaaccctatctctactaaaaatacaaaaattagccaggcatggtggcaggcacctgtaatcccagctactcaggaggctgaggcaggagaatcacttgaacctgggaggcggaggttgcagtgggccgagatcacaccactgcactccagtctgggcggcagagtgagactccatctcaaaataaataaataaataaaaataaaaactatcatagagttaaaaagtaaaaggtaagctgggaaagctctgtgcttctcatgccgcccagttccagcccaccccctccaggaagccctcctggccgccagcccaccttgctgcccctgaatcccagctcaggcgtcctctgcacaattcatgtcagtcgtgtctgccttgtcctgttgttgcggtctctcatcgtcttgtctgtcactccttcccaggggttgcaatagtgaccgtgtgccgggcttccaggcagccccaagtccagtgggaccagtgacccccctgcaaagcttctctgctcctataggccaggatttcccagccttggcactattgacatttggggccagatacatctttgtcagaggacgccctgtgcattgtgggatgtccagcagcatccctggccctcccctactgaagcagcagtacgtccctcaccccagcccaccagttgtgataaacaaagatgtctccacatgctgccaaatgtccctgggggagcaggatcatccccagctgagaagtaccgatgtattcccttcacaggtctgcatggaaccctggcctcagggctcccaccagggcactcaggcatagcgcgaatgggcacaggtgtgttaggagtctggagtcgcacatgtgcactcctgctgagcagacagacctttatggagacgaaggttggaaaggaatcggtgcacatctcgagctgaacacttgtgtgatgctgctacggaggaagtccgagcagaactggaactttgcggacactgcccctggacgtaggtgtgggcctgggcagggggagccacgcggaggtgcgaccaagtcctgcacggacctcactgcctccgtgtgatgtggtggctgtgctgtgagggcagctgagccctgtgtccagcctcgtagtcctcttggctggccccacactcaaattctagaacatttaagtgcagtgcaccgtggacaccacgaggctccacactgttggactccagtcctttagcccagctgggagcagccctgacacaataattcttcaacagaggcttctccttaaccctgtctcatgcttctcctctcccctcatccccaaggccgacagatggtggctgcacacacattcaggagattgcaggaaataatttccaacagcaaatgagacattaattattcaatgcagataaacatcaacaacagcgcttcatccaaaggaattccactgggatccaggggctctgagttggagcccagttcggtcctctactcatggtgacctcagacacagtctctgtgtctcgggctcactgctgtaaaatcatgcggcctgtcgatgggtccatgtcacttgcagcatcttagtcctcattctggaggacacgtgccctcttagcagtgagccctggaggggctgactcgcagtgtctgctgtgttttccagtttccatgatgtaaatgcaccagggctgattctgggctgccagtgttttgacaattgatttgcagactgcgtgaaaatttaaaactcagctctcttgagctgatatgagccaccccagcccacccctgcagcaggcacgaacgttagtttgcagggagaggccagctgagctgctgcacagacctgctgggatcatcacagctgtgcgcttcaggccagtgcctcttcctgtaaaaggaaacaacattctctctacagaggatggaaggacagaagggctgaggcccatgtgcaggcggggtcaggagagagaggaggccaagtccctgggtctaggaaagacgggtgggtggagccaggccaggggcactaagtggaacgctgtctgctccctgcggagcactggacagacttttggttccagggattcatcccgagctgtgtctcttccgggatccttggccagcagcgactctggcacctggagcacacctgaagagagcccccaagctctcgcctctctccagccctgctatccaaccagatgttcccactcctgctcctccctgcctcatcgcctcagccgcccggggtgagccacctactctcccaaggcaagacacagccggcatgcttcacacactcaccttgaagttcagggttggaaggtcagtccatccagctgaagttcactgctagagatgtaattgaatcagccctggcaggagcatttggaccacaggaataggtaaacacggctgcgagtcagcccctccagggctcactgctaagagggcacatcgtgtcctccagaatgaggactaagatgctgcaagtgacgtggacccatcgacaggccacatgattttacaacggtgggcccgaggcacagagactctgtccgaggtcaccatgagtagaggacggaactgagctttaactcagatcccagtggaattccttcggatgaagcgctgctgttgtttatcagcattgaataactaatgtctcatttgctgttggaaattatttcctgcaatctcctgaatgtgtgtgcagccgctgtctgccggcgcgtggggggttcttcatgaaaagtgagaggggtccagctgtgtgaaaggcctttgcaaattgccacagcaaactcccagaattatgatgtacttcttcctgtgtggttccaagtaaatgccacttccggctgtccagtaccattttttcctaggacttaaggccacaaaaatggattaagaaacacacatgtatacatgcaatcttcctggtgaagtcttcaaacaaagttctccaagaagtcattaaaaaattaatcatctggaaatgtcatgtttctccttctctctccaaaatgtatttctttcaaccattaactcattctctttcattgtgtcccatagtgagacaaaactgtgttaggacaataaaccaagcaattttccaaagaagctatagcacgaaagcaacgtaaatcccgaaggagaaacgcctgcgaatgagctcaccgaaggcacactctcctcccaggagcctccccggagaggcagcccgtttatttgagttagtgattttggaagacacactgcactttctttgcctccagctttccttgagccattttgttctccttgcgaggtactgatagcacttattatctagaaaatataaccagactttgaggagaggcaaggggccctataaattatttatttttttgcttctcaaactctggaccgaggaccaggattacaggcattgcctggaagcttgttacaaatgcagggcctcaggcacccccgtctccgtgtcagcagctgtgtcttagcaggatccccagggcattgcctcacagtcagggtggtgcaaaagtcccgcctggcatcctggtgagtggaccaggagggggcaggtgaaggcaatattattggtccttcgactccagacaagaacttgcagcttagcctgaggaaagaaattagcccatatgatgaaacacaatctgatgacgtaaggatttttgtacttatgcccacatgtttagacatggcagcccgcatcctcttaaacctgaactttaacataccgtgacttagagccacaaacaacaaaacagagggcaggaaccagagttctccagagaaacagccagtgggaaacaggacccacatccatacggatacaaacatacagatacaggctgggagagggaaggagagaggggcattggctcacactcttacagaagctgagaagccccacgatctgcgggagctgttggcctcccgtctggaggccagtaggctcgagacccagagagaatcgatgttttcattcaagtccaatggcaggaaaaagccaatgcctcagttcaaaggccgtcagacatgaggagtttcctcttagccttttgttccattcagaccttcaactgattggatgaggcccacccaccctggggagggccgtttgcttgacagtctcctgattcgaatgttcgtctcattcagaaacctcctcacacacccccagagtgacactgggtcaaaacgtctttgcaccctgcagtccagtcaaattcacatgtgcaattgagcttcacattgggcatttctgccctggtaatgtcctcccattaccaaaaacctggtatttgtccttcttttcagtgggtttcacagcccagcagcagctggccctcttgtagagcagcagttcccagccttttggcaccagggacaagtgtcgtggaagaaaatttttccacaaaccagggtggggtgggggtggggaatggttttgagatgattcaagtgcaattacatttattgtgcacactttatttctattatcacgttgtaatatataataaaataattatacaactcaccataatgtagaatcagtgggagccctgagcttgttttcctgcaactagacagtcccatctgggggtgatgggagacagtgacagataatcaagcattagattctcataaggagctcacaacccagatccctcacatgcacagttcacagtagcgttcacagtcctatgagactaatgccaccactcatctgacaggaagcggagctcaggcagtaatgagagcaatggggagtggctgtagatacagacgaagcttcacttactcatccacccactgctcatctcctgttgtgcagcctggttcccaacaggggttggaggcctctgttacagaggaccctctcctgaccgccaatgagacccatgagctcaccgtcttgtctgcccttccacagcccacgctccctcctcagcccacgccccctcctcagcccacactccctcctcaggctcagcactgggaagagttcgtccttcctcacctcagccctcaagtgtggagtccggcgcctcagtcatccactcaacagacatttatgagggaatgcttgggtgccattaacactgctgggaaagcagcagtggatcagatacaagctcactctcaaagagcttatatttcagtggaaggtggtgagcaatggactaataagccagtgaacacgtaacacctcctctgccaatacgtgaggtgaagagaagacagcagagagggggacagaggcggaatacaaatgttatgttagcagtgaacaatcagtaagtaaaataaaaacatcacttatagtagcataaagaaaccagaagcaaaagaggatgtactgcatgattcaatttatatacaactatttagagacaaatccaatctgtggtgacagaaagcagcacatcagacgcttaatgctgggagtaggggaatggattgcaaatgggcacgaagatattttcaggctgacgggaatctgtgtgctgattgtagggtggtatattagtctgttctcacgctgctaataaagacatacctgagactggacaatttataaaggaaagaggtttaatggactcacagttccacatggctggggaggccttataattatggcagaagacgaaaggcacatcatacatggcagcaggcaagacagagaatgagagccaagcgaaagcagaagccccttataaaaatcatcagatcttgcaagcctcattcactaccacgagaacagtatggggaaaactgcccccacaattcacttatctcccaccaggtccctccccaacatgtgggaattatgggagctacaa

SEQ ID NO: 200 - DNA, 2487 bp, Homo sapiens
ggcgagcttcttggcctaagggcaggaagagatggcagcgggggagacgcagctctacgccaaggtctccaacaagctcaagagccgcagcagcccctcgctcctggagcccctcctggccatgggcttcccggtgcacaccgcgctgaaagcgttggcagccacggggaggaagacggcggaggaggccttggcctggctgcatgatcattgcaatgacccttccctagacgaccccatcccccaggagtatgcccttttcctctgtccaacggggcccctgctggaaaaacttcaagagttctggagagagagcaagcgccagtgtgcaaagaacagagctcatgaggtcttcccacacgtgacactctgtgacttcttcacgtgtgaagaccagaaggtggaatgcctgtacgaggcgctgaagagagctggagacaggctcctgggctccttccccacggccgtgcctctggctctccactcctccatcagctacctcggcttcttcgtcagtggcagccccgcagacgtcatccgggaattcgccatgaccttcgccacggaagcatctctcttagcaggcacttccgtttcccgcttctggattttcagccaggtgcctggacatggccctaacctgaggctgagcaatttaactagagcctccttcgtgagccactacatccttcaaaaatactgctccgtgaagccttgcaccaaacagctgcatctgaccttggcccacaagttctacccccaccaccagaggacgctggagcagctggccagagccatccccctgggccacagctgccagtggaccgcagcactctactcccgagacatgcgctttgtgcactaccagaccctgagagccctattccagtacaaaccccagaacgtggatgagctgacgctaagtcctggtgactacatctttgtggaccccacgcagcaggacgaagccagcgagggctgggtgattgggatctcacagcggacgggctgccggggcttcctgccggaaaactacacggatcgagccagtgagtctgacacgtgggtgaagcacaggatgtacaccttcagtctagccacagacctgaactccagaaaggatggtgaagccagcagcagatgcagcggggaatttcttccacaaacggcaaggagtcttagcagcttacaggccttgcaggctaccgttgcaaggaagagcgtgctggtggttcgccacggggagagagtggatcagatcttcgggaaggcatggctgcagcaatgctccactcctgatgggaaatactacaggccagacctgaatttcccctgcagtctgccaagacggagtcgtgggatcaaagactttgaaaacgatcccccattatcatcgtgtggcattttccagtccagaattgcaggggacgcgctactggacagtggtatcagaatcagctctgtgtttgcctccccagccctccgctgtgtgcagacggccaaactcatcctggaagaactcaaactggagaaaaaaatcaagatacgagtggaacctggaatctttgaatggacaaaatgggaagctggcaaaaccaccccaaccctcatgagcctggaagagctgaaagaggcaaatttcaacattgacactgattacaggcccgcgtttcccctgtccgccctcatgccggccgagagctaccaggagtacatggacaggtgcacggcgagcatggtgcaaatcgtcaacacctgtccacaggacacgggtgtcatcctaattgtgagtcacggctccactctggactcctgcacgcggccactgctcgggctgccgccccgggaatgtggggattttgcccaactcgtgagaaagatcccttccctgggcatgtgcttctgtgaagaaaataaagaggaaggaaaatgggagttggtgaacccaccggtgaagaccctgacccacggggcgaacgcagcatttaactggaggaactggatctcaggcaactgagagccacggtgatgttgtcataacctcagagtggagaggcagaaaccatgtgcagaggctgggagatgctgctgtttccagaggcgtcttagtctcacccaatgtgatttgtagaagcacgagacgcacttttatatcccggaatatttccctccggctttcgcctttgtaactcccatctgtggacccatcgtccaccagcccagctgcggggagcacagggcaggtggctgggtgaggatgccgccctgcagcatgtacaccgagtgtctgcagctggggacacaactgcccgggactctaacttccaggaattaaagactcaccacacacgaaggatctaaccacttcattttccatggtctaatcattaaattcccaatcgttttttctttttctgggtccatcactctttagccatatccacatgggctaaaacaggtgtaatagtcaataaaatggtcccagaa

SEQ ID NO: 201 - protein, 649 aa, Homo sapiens
MAAGETQLYAKVSNKLKSRSSPSLLEPLLAMGFPVHTALKAATGRKTAEEAWLHDHCNDPSLDDPIPQEYALFLCPTGPLLEKLQEFWRESKRQCAKNRAHEVFPHVTLCDFFTCEDQKVECLYEALKRAGDRLLGSFPTAVPLALHSSISYLGFFVSGSPADVIREFAMTFATEASLLAGTSVSRFWIFSQVPGHGPNLRLSNLTRASFVSHYILQKYCSVKPCTKQLHLTLAHKFYPHHQRTLEQLARAIPLGHSCQWTAAKRDMRFVHYQTLRALFQYKPQNVDELTLSPGDYIFVDPTQQDEASEGWVIGISQRTGCRGFLPENYTDRASESDTWVKHRMYTFSLATDLNSRKDGEASSRCSGEFLPQTARSLSSLQALQATVARKSVLVVRHGERVDQIFGKAWLQQCSTPDGKYYRPDLNFPCSLPRRSRGIKDFENDPPLSSCGIFQSRIAGDALLDSGIRISSVFDALRCVQTAKLIELKLEKKIKIRVEPGIFEWTKWEAGKTTPTLMSLEELKEANFNIDTDYRPAFPLSALMPAESYQEYMDRCTASMVQIVNTCPQDTGVILIVSHGSTLDSCWLLGLPPRECGDFAQLVRKIPSLGMCFCEENKEEGKWELVNPPVKTLTHGANAAFNWRNWISGN

SEQ ID NO: 202 - DNA, 25229 bp, Mus musculus
  misc_feature (1)...(25229): n = A,T,C or G
ggacccagaagtaaaacagaattctgaagaagaacgggacactgtcctggggggggggggggctggctaactcagctaggactttgcgggagctaagaaacgggagaagccacagtacaaaacaccagttttattacaaatatcaaacacccatagaacacccaaatgccagcctatgcctttggttaattgcaagctgcttgtcctttctctctgtacactttgggcgtttcttctcattctatcacaacgccacataaaccaggtttgtgtgtgcatgctgtgatacaagctcagcaccgggagggtggagaccggagatttagcagctcagtgttggtgtgaggtacctgaaaccccgtctaatagggagcgggtcggggaaacacattcgtggtaaattccgggtatctcctagagtttacattttctcatgtaacaagcacctccgctcctcaactgtctccgtgggtgtggtaatatctttgctcccaggttctctgtcacacagagtagaggacaggagggggacagcacgcagtgtgcagtccagaggccttgtcagtctgcaggagccgcaagagcctctaccatggcccggtagcaccctcctctcttcatgagctgcaggtgggtgccctgctcgccgacagagccttctctgagaaagaggatgtggtgggcctgctctgccaggctgagctgctgggtgataagaagaaccgtccgagaagcccgcttggggctctcatacaggagccgctggacctggagaaacacacagacattacagttcaggggacccctgtgcttccagggctgggacacattgtcgatatccctggtctgcagcacccctccaaacctatgacttgttaagatgtcctcacaagaggggggtacagagagagagagagcggaagcatgatgggggaggggactgaacagtctctcatctctacccataagctgggaaatttgaaaaggaaattattcttctcccatatattacatcccgactgctgttcccccctcctctcctcccagtccctcctactcaaccccctacctctcctcgattgcccttcagaaaaaagcaggcctcccaaggacaccaactgtcttgggagatggcatactaagtgaagtaagactagggtctcctcgtccagccttaatatgtggaaatttttttacgttccaaaaaacatatattaatttatgctttgagaatttcatatatgaatataatgaaatataaccataccacctcccgtttccctcctcttcccccccccacccaccccacatgtcacctttcctatgtcatacatatttttaataacccactaataagctgagaaaacattttgtaatttgtttttattttatgttcattgacgttttgcttgtgtgcaggtgtcagaaaccctggagctggagctgcagatggttgtgagctgccatgtgggtgctgagaattgaacccaggtcctctggaagagcagctaatgctcttaaaactaatgctattaactgctgagccacccctcagcccctaaaatgagaattttttatagtcaatctaaagaaatgtaatgcaggggctggagagtcagctcagcagttaagagcactggctgctcttccagcagaccagggcttgacttccagtacccacatagtggttcacaaccatccataacgccagttccaggggatccacaccttcttctgactttcagagacactgggcacatacatacattcaggctaaacactcatacacataaaataaattaatcttagtttaaaaaaaaaaagagtaagagtaacaaagagcacgagtgtttggatgatttgtgtctggacccaggctccactgctcaaaagctgtgtgacttttagaaggttaatcaacctctcctagcctctattttgtcatctacagaataagcacagcaaaagactctgatggacaaattagtacaaagggtgggatagaacgtctacgacacaaagcaagcttagcccatacagattgttaggacagtagccctgctcactggttcccgtgtccgggagaaaagctaatgggaccaagagttccaaggacaggtttgaacagttctgttgttggtataactaacacaggaggagtggcagaagcaaagctcccatgggaatgagacttcagggagatgacacagcagggtgacccagccctccagaggtagcagcaggaagactaccaagggtctgaggccagcattgtcttcaaagtgaggtccaggccagccaagatcacatagcaagatggctcaaaaagacaaagggtgagagccagaaccttacccgtagctggttgccagcatccagggcactggtggcatcatccaagataagcaggagtggcttccggatcaaggctcgggccaaggccactgcctgtcgctgacctcctgacagctggttcccagtctcacctacctctgcagagacaagagtccagctgagatgtagatagttgtgtacacatacacagcacacatacacactcatatacatacacagccacacacacatatatatactcacatacatacacacatacatacacaggcacacatatatatattcacatacatacatacacacatacatacacactcacataacacagacacatacatacacacatacatacacaggcacacacatacgtactcacataggcatatacacacacataaacatacattcacataggcacacatacctactcacacacttacacacatatacacagacacagacacacagactcactcaaatacacacacatacacactcacatacacagacacatacacactcacacatacacacatacacagacacacatacatacacactcacacaaacacatatagacatacagactcacatacacacatacacatgcatacatgtatacactctcatacacatacacactcacataaatacacacatacattccctcagggtatgatacacactcacatacacgggcacacatacacactctcatacacactcacatacacacacatacacactctctctcacacacacacacaagggcatgggcgcagctgacaggggcagtggaaatggaggccctatgaaggcagatggagtctgaggatgtgaatcttagagtttcaactacaaattgacatccaagggacaagagggattgaataataaaggcaggattgttggaatctggatgggagagtgcagatacctgtgtcatagccctgagggaacccagagatgaaatcgtgggctccagactccacggccacagctgtgatttcctccatggttggagtccggttcaggccatacgcaatattttctcgaaagcttcttccaaatagcagcggctcttgtcccactgcggccacctgaggtcaaatgtgaagagccacaggcaagaaacaccagtgttattgtccagggactgaagattcacaatcttgtgcataccatacagtcacgtgacttctgtccacagccccgactctgcccatggctgcctgcatcccctaactctctgcaagagttttcgtggagaattgtctcttggcttgatctcctcccctcccccacacctccttcttgctcacctgagtgtgcaggtaatggtgatcatactggaccaggcactggccatccagcagcagctggcccccggtgggctggtacaggttctgcagcagggcagccacggtgctcttccctgatccattgggtcccaccaacgctgtcaccgttccaggatgcagggtgaacgtcagcccctggaggccagagaagctcgtggcaaggaggaggaggaggagaaggagggagaggaggagaaggaagaagaagaagaagaagaagaagaagaagaagaagaagaagaagaagaagaagaagaagaagaagaagaagaaggaggcataaaagggatgggtagacagtacctgaagcacctggactttgggctggtttgggtaggcaaaagagacatcttggaactccacaaggcctttcatgtttgagggtgccaacgagccactgagtggagagcaaggagtccggtccaagtattcgaatattttctctgaggagcccacagccttctgcatggaggggtagagggagagcaggacctgcattgcagagcggggtgtgtgtgagcctgggatggaccacgaaagcaagtgagccgtctaacctgcttgacagcattcagggaacaggcggaggatgcgcaaagcggcagagaaggcaatggacaggctgagaccgccgactgcgggggcggggctcacctgaacagcctgggtgaactgaagctggtagagaacgaatgagacaaggttgccgctgctgacagcccctctgatcaccagctgcccgcccaggtacagaattcccaccttcagcagcattcccgagacctacagggaaaccatgggatgaaacgaactgcaatgatcacatggaaggtcttttctcccagacacgtgagattagggggaaggcggggtcaatggtcagactcaaacacagctcacatcttccatgtcctcctcctcatcgctgccggctccttgtttcaggagcatttgacactttttaaaaagatttatttttatagttctaaattatgtctgtgtgtctgtctgtctgtctgtctgtctgtctgcgggtacaggcatatgagtgtaggcacccacagaggtcagaagagggcatcagaacccctagagctacagccgcaggcagttgtgagctgcccttcataggtgctggtatctggaagagcagtctgcatccttaacagctgaaccatgtccagcctgtattacaaagctaaacacagcggctcacatcacgagcctctgtataggagattatgttattatgttatacctttcttgctgctgtttaatattacttttttactacatttgtttgtttgtttgtttgtttacttatttttgtatgtgagtaggcaccacagtgcaccttgtggaggtgagaggacaactttcaggagtcagttctcctgtcctccatatgggttcctgagatggatctcaggtcaccaggctcagcagcacgacagcaggcacctttacctactgagtcatctcactccccaataccctttaatgagacaagtctcacatcatagctcatgatggctggaaactcacagcaatcctcctgcctcagcatgagtcctgggattacagatgtgaaccaccacatcaggttttactcccatttttcaaatcagggcaacagcctcagaaaaaggtaacatgtgctggatacagaactggtgggtggcaggaaggatcctggaatctcggttacagctttagttccagctgcccctggccgctggcctctggcacttctcgtggctcccactagcttgcccacacagtgccaacatgaagcgcacaccgtgcaggaaatgtgtggctttctgagaagccaaggaagtgccggagttgggagagtggtatctccttaacacacaggtcaagtgggctttgtgtgccaatgtggaaggctgattcttaacactacaaaacactgagagaattaagggcagagtccttaattgagtaatcaagagccgaagccaatcacttcccactggaggaggagcaggggggttggaaaacagcagaatcaagacatgttcacacaaaggatgggatatccacctcctgtactcacactcgtggtccagacttcagccacgtaagccaaggcctccttcttgtttagagtcttcatttcttccaacttctgcctgaacttctgggcctcaccctcctcgttggcaaagctccgcacagtaggcatcgccgataaggcctcaagggccacctgcgtggactttgctagagactcctgcaccttcactgccagtgactatggaagacaaggaccagagacatcacacggggtgcaaatgagagagaatatggacacctaggttagctgcgtggagattatagagtcaagagtcagagggacagagggaagagaaaggtctacagccatacttctaggtagaaggggcgtggaggaaatgaatccagtttttgtaagatttattttatcgtgtatgtgtgtgcatcatgtgtatagatctccatggagaccagaagagggagtcagatcccctgaagctggaactacagaccacagagaactaactgcttagtgtgcactgggaatcaaactcaggtcctctgaggaacagtcagcactcttaaccccgagccgtctctccagcctgagagcctattctttaaggacagattgtggccagaagttagacaagaaggcagagtacagagatgcaggtgcagggcagtgcggggtcagaggtcacaggtcagaggttcaggatgatggaggactggaaagccacactgaaagcagtctaggagaaactaaatgtaggagctgaggatctggggacgtacctgatgcacttttcccagcttcttaggcaaaagaaaaagcaggggcaggttgatcagggtgaccagagtgaggtacggtgacccccaaaacatgaacaccaagagacacagggctcgccccaggtaccacagcagcaggctcagcgtgccactaatggactcgcacacgttggctgtgtcctcagtcacccgagatgtgatggaacctgcccagattgagaagagagacagtgagcaagcggttcacagagacaagaggagctgacagtgggggccagggtgggcccgtcagcacagcatcctgaggcgggtaacgggtaggagactggggaggcgcaggaacttcaatgcaggggaaaagaaaggaaagatctggttaggcctgtgcttgccagtaaaggagttgtcgctgggtgtggtggcacacacctttaatcccaacagactgggggcaaaggcagcaaaggccactctgggctacctagtgaattctaggccagccaaggctacacagtgatgccctgtaatgtgaagtgaacttccagttccctgaaagctttcagctcttcagttactttaactcctgtctgttgcctgccgctggccctccctccagtagccgtggagagaagggaggaagcaaccagagaggcaggcccagggtcctttaggaaatggagaccctcgggtctaacctcggtgcatctgcctaggtaggtttcagcgtctagtgtctaggattcagtttcctccatttaaaatgaggccgttggagttgagggtctctggctttccagggctgtaagtctgctgcttcatatggggaacaatgaatgcaaatacagttttccttagggtaaaaaagacaatgttttgctacatttgagatataccatgaataaggcttgggggtcactcagttgttagagcttttccctaacatacaggaagtcttggatatagagaaaggatctcatgtagcctagggtagccccagattgactatgtagctgaaagactttgaactttgacctctaggtcctgcctccatcccccaagtgttggaattaccacaccccatccatatggttctgaggatccagcctgggcatgtgtgtgtggacatgtttggggggggggggcagtcgagagcgtgtgtggcggtatagagattatagcatacaagtgaaaaggtttcatgagagacctgctgggttcttcaggaaaaaccctgtctcctggcgaaggacggcccgaaacacctctctgtgcacacggccgtgcatgtgtcccatggtgatgttgtagattccatcacttgcaaactccagcgctgtgctagagtcagagacacgggaggatcagttgtctccttcctgagacagagtcccagatccccacagaagtgtaacttaaatgacagtcccaacagccagtcccctctgctctgggacccccattcccatcctccacacctggctatggtgagaatggacatgagccatatgttgcgggtgaagctaggaactgtcttatcctgaagaatccagtcagtgatgcggcccgtgaagaagggaatggccatttcccctggggagagaggagagacacctcagtcacaaacattatgagcaaactacccgcaacttctgcccctctcccttcaccactatccaggaagctgagctcccagacccaagcctgttcacagacccaagcctgctcggctacatcaaacttctcaagggctacttgagggcggttagcagaccttgggggcacaggctgttaatcccagcactccaagtagaagcgagcagatctctctgggtttgagaccaacctgggctacataatgaattccagaagagccaaagctacaaagaaagaccctatctcaaaaaggaaagaatagaaaagaggggaagggggaggggaggggaggggaggggaggggaggggaggggaggggaggggaggggaggggaggggaggggaggggagaggagaggagaggaggggaggggaggggaggggagaggagaggagaggaggggaggggagaggagaggagaggaggggagaggagaggagaggagaggagaggagaggagaggaagaggagaggagaagatggcggtgtggaaagaaaccttcacatttgggctatgatgtgaagttctgctcccagaagaccctgtccccaacgcccttgtctggaccccttctcgggcctgggtccttctctttccgcctaagttgcctccttagtgtctctgacgcttcccgggactactttactctccctttctgcctggaatgcccattgccctgtcccctgtggcctgctctttcacccagtctcccttaccaaggcaagagagaatcaagagaaccagaaccaggtagagacgtctcttcttagggcccaggaagcccagcatccgacacagcatgtctccagcgtccctgttgccgctgggcgcccagaggctccccaacttgtgccacagggcggctgcgggcaatgctgccacataactgatagcgaaggcatctggacgactgttccagtacagtaatccagcgctgtcaccctcccggagtgttccccaggcggccagctctcggaacaaggcaagtccaggcagggccaaactcagtgcggccaccagcggctgcaaagcagccagccagccatgggctcctgcggtgaccccgaggaccccgcggacccctagtcctaggatggcccagcgactcaggcccaccacccagacccggagcagcggcacctcgggaaccaacagggagaagattcccgggagcatgggccgcagcagcagccagtccaccagaaggagcagggcggccgccagccagacgtgcgcagccatcgagcgtgagctgtccagagtctggtcctagcctgggactctcgacgtccgcgctgcacaggagtctccgtggggaaggaagaagggcgggtccgagggcgtgcgcgtaaagtcccgggaacccgctcgagctggtggagctgactagaagtgctggcgtttagaggaagaagaaaccgaaagccgacctcgaatcactagacacgcctccttctgagactggcttgctcaggctgttctggaagctgccgctgaagctgtagttggagttctgcctagcagccctggcctgtcgtgttcttctccatgaatctcattctcctcttcttccccagcccccttaacttgcttgcgtgaattttcccatcccaggccccaccccagattgagggcaggaccctctgtcgtcacctgtctctgggcagatttgccctgctcaggtttgctctgggcgccaaatgctggtagaacggcacgccccttgcgcgatgatggggcggggcctcagtctgcaagttgcctgcaccgcgcgcagccgctgattggaaagccgagccccgctctgctgagatgctgcgggcaggagcacctaccgccggctcgttccggacggaagaagtccacaccggggtaatgggtctcggggtgagagtcagcgggtggagtgatcagggacccctaaagctctggaagtaaaccaagagacttaggaagcttgtagcgcccagcgcttgcgctccacagtgaacgtagggtatccctgctcagaagtgtggtgtccaggggtctgtggagggatccgcatgcgaagctggtgagaaggtgcgttctttggcttgagctggaagcgtctaagggaagttgctccaaagcgctttcgctttcactctagactgcgcagttggggttactggctaaatcaagtgaggggcttggggacccctgcaaaagaggtgctgaggtgtcctggatgaagcacctgagagaaggtaatatggaggctcactgaaaaggacctacctacacatcatacagatctttgcttaacctagccccagacagcccccaccctgagtgaggacaagctctctggcgccaggattgagggggagatggggatgatcggtggtcctccttgttccaggtgctgccctgcagcacactccaccccaccctgtcccaacaccgtcattcccatgcttgcctgagaactttgcccagacctaggagctgggaagatggcagctggtttctgctctctaaaagccaccaaccacagtgttaacatggtgtggaggaacaaagtggacatttctggccttttacttgtgctcagaaagcacactcgcgggcagggtccccggagatcagaacgacatggagtggacagaaaggttggaaaaagtctccctcgctgccacggagctgtgggacttagaaatcaaatcaatcaagggttcagagtgagacctgagtcaacttgggaagctcattcgtctccataagtcagttttctcagtgcacccaagggtctcctaaggtgccttttaacctagaaggtgtgggggaagtagatgtgtctaccctccttcacttatccgtaattctttccttgacctggaaaaactctgctatccagaagtcctttcccctggctgcagagacttcgcttaagtgaaatttgtgccctacctgaaggatccttgctgcttctgtgtctcgactcctggccatgttaacccccggcctctctgtgtcccttgttcagtaacactaaggctccccttctgataaagtaaggttgcaggtgggggatccaggaccaggaaagacctggtcttgtgtcacagtaattcacagtaatgatgcatgtggtacgcaattcacaagcagcggggccggtttcctgggccttcctctcagttcttgctctcctcatgcagattgtgtctgcctccaggaaccatccttgcttttcagggtgaccttgagtcggtcacctcctgcatggacattttctcctccttaagatggaggctcaagacgctcctagctctgacttttcgtactgtctctctgcagacaaccatcatggcagtggagtttgacgggggtgtcgtggtgggctctgattcccgggtgtcagcagggtgagtagtgtcaaaggcccgtgtgttggagggaagctggtggccctaagtgcacatttttcttgcccacttctgaggagtatgataaccttccaagaaatgaagctgatctttccaaaaaagtatcataatgcattgatggagaggcgtctgggtctctgaatccatggcattcatgaatattttgtagcttgatggacataaagaaatagtatctcggagggacacgggtaggttgtagatggactgtgttatctgcagttaggataaaagataaatggtggttttctgaagcagttatctcactcatttgcctgagtttgaagtaagtttgattggtctcccgtcctggctagtttgctcacacacaagtcagactgggatgacatccatgctgtttctgccatgttccatagaaccaccgttgcccctcaaagtgatgaactgcaaggaaattctggaaagaggcaatttttttctcttgtttcactttttgtttttagagacagggtttctctgtgtagccctggctgtcctggaactcactttgtagaccaggctggcctcgaactcagaaatccgcctgcctctgcctcccaagtgctgggattaaaagcgtgagccaccactgcctgccatagaagcacacttttcttgcctaggtgttcttttgttgttttgttataaaaaaaaaataagtctttaaaagtctaatattttgggtctggagagatggctcagtggttaagagcactgctcttccttaccacccggggttcaatttccagcacccacatggcagctcacaactgtctgtaactccagttccaggggagctgacaacctcacacaggcaaacatgcagtcaaaacaccaatggacatgaaataaagataaacaaatctatttttaaaagtctagtgttttgggagtatagtctctaaaataggatctctcctgtagcccaggttgacctcaaacttgctatgtagtcaaggctggccttgaactcctgttcctcctgactctaccttctgagtgctaggagtacaagtatggccgccatgcccacctcatgctatgctgggctttgtgcgtgccaggtaggtactctaccacctgggctacacctcccctcgacacacacacacacacacacacacacacacacagagccaagcacatctaactttgattactacagtgacttactgatctgagatgtcttttttttttttcctgctttaacctaagcattgcaagctctacaattatctttttaaaccaacttgaacgtttggttcttccttacagaacagcagtggtgaaccgcgtgttcgacaagctctcccctctgcaccagcacatcttctgtgccctctcaggttccgctgctgatgcccaagccatagctgacatggccgcctaccagctggagctacacgggtacaaagccctggggtcctgactcccctcccgctaaaactccccaactgcgtggctctgccagctttgagctcccactggagtgtctgggagccagtgttctgcgtctgtgaagaggaaatcacggtagtgactccacctcccctgtgctgacttgaaaagtgcacatcactgccctgatgtaggaactcaggaagaagacagccatttggcccactcctaatatcaggcagttgccaggagaaatcaaggtcactgggacggaagcaagcttatcatctgctttaaccgacgagggcagggcccttagaggcaagggaggggtttatcattgggagtgggaaggtggagcagagaaaagcaggtgaagagccgaggacctccattgtggagctctggcccccctaggcacatgggagggaagctggtatctgtgcagccgctggttcaagcgtgacttggcagagagggcaatgggctaacaagagtgagactcagcagagtgctgttgaccctccttcccgacatccgcttcaggttggagctggaggagccgcccctcgttctggctgctgcaaacgtggtgaagaacatctcctacaagtaccgtgaggacttgttagcgcatctcatagtagctggctgggaccaacgtgaggggggacaggtgagtgtgtccattccaggtctcagggttccccactcctctcttcagagagatgaaagttgcatgtctttctagctttgtggtccagagacagttcctctaaagacatcctacagccccgattacagtggtacacatcttcagtctcggcactcgggaggcaggggcatgtggatctctgtgggtatgaagaacctgctctctagagagagttccaggcaagccagggctacattagtgaaaccctgtttcaaaacaagcaaaaataaatgataaaagcatactgtaggctcaagtgtgggcgtcccaggtcttcacagctcatctaacatgaaggagccctgggatgatcctgacctgacctgagggaccctctctctaggtgtatggaaccatgggagggatgctaattcgacagccctttaccatcggcggttctggaagctcctacatttacggttatgtggacgcagcttataagccaggcatgacccctgaggagtgccggcgtttcaccacaaatggtaactagccaactgagaagtgacttggggggagggtttgtggacgtggaaagaaagtagattgtaaagaataagaaaagaaatacaagggtggccattccgtgtcgaagcttttaaaaagaaatatttacttttaattatgcatgtgtacatgagtgtgtctctgtgtgggtttgtgcgtgtgtatgtggaagccagaagaggatgctgggtcctctggagctggagttacaggtgtttgtaaggcaccctatgtgggtgctgggaaccaaactctgtaaaagtaataggtgctcttaaccactgagcctctccatctccatcttttggaactgggagacatttgagagtgggaggggatagacaagacaaatggtaaaagagatggggctgagggggggcagtagggatggagcaggactgtcttaagcaaatcacgtaagggtatgaggtcactatgggaaccagcagtgaattgagctctcccctccacccaccaacccccgcccccagctagctcacacgaacttgatggctcagcagtcaaggatttggacaatgtgtgctagcctataggtaacttgaacgtttacagtagggatatgggcaggtgctggtttgctggacgttgtgatgtgttctggggggaagtagcatgtagttggaaagggaaggaaacgagtatttaagtcatttttttttttttttgctcctctttccaacgtgaatcctctacagccatcactctggccatgaaccgagatggctctagtgggggtgtcatctacctggtcaccatcacagctgctggtgtggaccatcgagtcatcctgggagatgagctgccaaaattctacgatgagtgactgatccccagaagtcccttccttgtttgtaataaactttctggaaccagaaggctggtgcgatgggcaaaggtgaaatatgtgtatcagagagacacggtgtgtggagggaagcgtcctccccggcccagatcagcatgcccttccattcttttgtaaaaataaactttattattaaaaaaataaataaatcattagttgcaaataaataaaaaagcatccacacaaagggaaccacattcaaagtctgcgagactcagtgaacttctagacagtaagaactgagatttaaaatggaatctgtgaagttcgacattaaattgaagaccttcttgttctttatccccatgccaaacactttctccagagaaagagagcggagcaccctgggagaaaagccctcagatatgagaggtcactgtgggttgacttctttttaattttatagatttgtttactttcattgtatgtggtttttttttttcttcctgcatggatgtgtgcaggtccctgtagaggccagaagaaggacactggaaactggaactggagtctgcttgcaagctgccatgtgggtgctgggaactgaacccgggccctctgcaagaacagccaggtgcttaaccactgagccatctctcctgcccctggatgggttgtaatattgtagatcctgtgctgaggagatggctcagtcaataaagggctagctgtgcacaaaaatttgggaccagattgccagcacttacttaaaaaccaggtacagtgacacctacctagaacttcagtactggggaggcagaaacacagacccgtggaacacattgaccaacaaaatcaatgagttccaagttcagttagaaaccctgtcccaaaaagtaaggtagagagagactgaagaagtcacctgctaatgacctgtggcctccacatgccacacaggataaataatgctttaaaataattcaaaccacaaaaattgcacaggacagctgaacacagttcaaaggtaaagctaaaaagaaagatatggtttcactttggggctcacagatgagggtacaaaccattgcccctgacaagcagctcatgggtgtcccaggagccatgttaaacagctctcaaaccccatggtttcatgtccttaggcagggtcaatcattcccttcatcctgtcagatgaaggctcagtcaccctgaggtggtttgtgtcttcagagctcagggccattttgctaataactaaatgagcaggcgtagtcaactgaaccttgagtatgaatctgagcacacagatccaatatgctctgtatggtcccgctcctttgaaaccgggtgcttgtggtgggtcatctaaactcaatgcctggatctgcttctaactctgttgtttaatttttttttaaatataaatgatagtttaagagcccaccccttcccctcgtctctccagagtatgatgaccactgagaactctggataggattcagaaagcaggaactgaaagtggccagtgagcagagtcagaactcccagcatgccctgaaaccagccccggtgcaccctgctcaactgcagccaggagggaggtctccctggtgaggggaacggagaaggggtcaggtggggactctccgaactcagttagccttaacacctcaagcctgtgacatgtctgaaccagcaccacacagccagccagcaacaagctgaaatgcaaacgcattcacactggaaggcttcgttctatcaatcaaacaactgtatcattcgttccaagagtttgaaacatctcccagaggcaagattaaaaaaaaaaaaaaagcatctgagacaaagggaaactgagggtgagaaaaataaataaagccaaagactaaaacaaatgtacaacagaactgtcaagaaataacatggcccgtgggtaatggtcaaagttctattccctggatccacgtggtcagggaagaatggagagcccttgaagctgtcctctgacctcagggcacacaggcatcttgcacaacagacagacagacagacaaataagcatataccacgtggcgctagcttacaagggctggcagacccaccgaaatacttgagagttctgaaagacagttgttaaccactggcaacttgatgttgtctgcagtggaaatatctaagaccatggaaaccgaaaacactacaagttgggactttttgagttctcaaatggccaatttaacagtacaggtattggtcacaaactatcaaacaggcaacagctggttctgagccacaaggcagtaagagcaaagaaagaaagaaaaccaggcagaagactaataaaattccatctttaaatctccatctcaaataccaaaagcgatattcaacttttgaagccaagtaggaccaggactgagtggtttatacttgtactaaagcaatccctagtcagtttcaaagagccagagtcccagtggtttatacttatactaaagcaatccctagtcagtttcagagagccagggtcccagtggtttatgtttatactaaagcaatccctagtcagtttcagagagccagggtcccagaaactgtgctctgtaacagcctggcaacttagcaacaaatagacacttagaatcctcgtgctttggaaactaacaaaacattgctcacggggatttaagacaaaacctcaaatgaagtaactcatttactgggaaatggctggtaaaaatgttacatatggaaaatgttacatgttaccagagaggcagagcctgcagattctgaattcaaagccagtcaagaatagacaacaagaatgaccttgtctcaaaaaaaaaaattacatgtccaggaaagcagaggagagactgtctataggaagagaagtcatgtctacaggaaggggacaatgaaagggaacacttgatcaaagtcttgtcccatctagggttactattactgcaatgaaaccccaggaccaaagctacctgggaaggaaagcgttcatcctgtttacacttccacatagctgttagtcaccgaaggaaatcaggacaggaatctggaggcaggagctgatgcagaggccatggaggggcgtcctcatcacttgctcagcctgctttcttatagaaaccaggactgccagcccaggaatggcgccacccacaatgggcttggccctcccctatcaatcactaatttagaaagttgttccagacgttttcttaagccatcctctcaagatgactttaacttatgtcaagttagcccaaaactacccagcacagtacttatatgataatgtcttcatgagacccgatacgatactatgcaaaacaaacaaacaaaaaaaatcatatgtcaacttctgtaggatgtagataaatatacactttgaaagaattatattccttcaaatacagttatttgggccctcaagatattgcagtgggtaaaagcacttgttgactgactctgatcttgagtgcaaatcccagatcctactgtggaaggaaagggctgactcctgaaagttgtcctctgacctctagacagccctacagtgtgcgcgcacaccacacactcacacaccaccaccaccaccaccgccactacttccaatgcaaataaatttaaggaaaaaatacatttttttttgttataacaggagaaattaaaagcaaatgacctaaaaattctcaaaaatccatgaaagagccgggactggtgatatagacctttaattccagcacttgggaggtaatggtaggaggaggagctatctgagttcaaggctagcctggtctgcatagtgagttccaggctagccaaggctacatagtcagaccttgtctcaaaaagcaaaacaaacacttggggcaagtgctggtcagacggctcagaagttgaaagcaaatcttgcttttgcagaggacccaagttcaattcccagcacccacatgatggcttacaaccatctgtgactccagttccaggggatcctgcaccctctttggcttcctcgggcactgcatgcacatgatgcacatatatccaaacaggcaaaatactcatccgcataaaattaataaatcttttttttttttttttggttttttcaagaaagggtttctctgtgtagccctggctgtcctggcactcactttgtagaccaggctggcctcgaactcagaaatctgcctgcctctgcctcccgagtgctgggattaaaggcgtgcgccaccaccgcccggcaaattaataaatcttaaaaaaaaaaagaagaagaggaagaagaagaagaagaagaagaagaagaagaagaagaagaagaagaagaagaagaagaagaagaagaagaagaccacagattactgtcaccaaaaactggagttcagttccctgtacccacaccaggtagtacatggctgcttgtaacttcagccctttactggatcatgaaatagatccactaaggggtttcatctgctttagggctttgtgcacaaaggtcgctgttcccttgacatgaggggcccaggactccttagttctccacgattggaactggattcctattgtttctgccatggccctcaactgtaaccttctgggctcccaggcttcttaatagactttactgctgccagggtttttaaagaaacctttgaaaagactctttccccctcctcccaccctcatcatcactcccccacccatgataagtccatgagttacagaccagtgggaactggtcgaatagcaaaaacttcaattgaccttcctaagaaaaaccatcttaggacaagggagaaatgacagaagaggaagcatgccaaacaccttctatatgctatcccagaatctttagtttaggatacaaagggtgtttggtttctgtctctctaaagaactggggcaggggtaaaggggagatggtgggggcataaagggggcagtgtggacaggatggacccagagccctagttcattctataatctccctttttaccaccctacccagaagctcactgcggggcacttcccacatacctttttaaaaaccaaagatgtatatattttttatttatgtgtgtatctgcatgtatgtacaccacgtgcgtgcaattcccatggaggccagaagagggcgactgatttactcaaacattttctgctttaaatattggttttaactttaagaaaaccttctgtctccgttgcttttcctnnnnnnnnnnnnnnnnnnnnaacaggagaaattaaaagcaaatgacctaaaaattctcaaaaatccatgaaagagccgggactggtgatatagacctttaattccagcacttgggcggtaatggcaagaggaagagctttctgagttcaaggctagcctggtctgcatagtgagttccaggctagccaaggctacataatcagaccttgtctcaaaaagcaaaacaaacacttggggcaagtgctggacagatggctcagaagctaaaagcacatcttgtttttgcagaggacccaagttcaattcccagcacccgcatgatggcttacaaccatctgtgactccagttccaggggatcctgcaccctctttggcttcctccggcactgcatgcacatgatgcacatatatccaaacaggcaaaacactcatccacataaaattaataaatctttagaaaaaaaaaagaaaaccacagactactgtcaccaaggactggagttcagctccctgtacccacaccaggtagtacatggctgcttgtaacttcaaccctttactggatcatgacgtagatccactaaagggtttcatctgcgttagggctttgtgcacaaagatcgctgttcccttgacatgaggggcccaggactccttagttctccacgattggaactggattcctattgtttctgccatggccctcaactgtaaccttctgggctcccaggcttcttaatagactttactgctgccagggtttttaaagaaacctttgaaaagactctttccctctcctcccaccctcatgatcactccctcaacccccatgatcttgcataagtccatgagttacagaccagtgggaactggtcgaaatagcaaaaactttcaattgaccttcctaagaaaaaccatcttaggacaagggagaaatgacagaagaggaagcatgccaaacaccttcatatgctattccagaatctttagtttaggatacaaagggtgtttggtttctgtctctctaaagaactggggcaggggtaaaggggagatggtgggggcataaagggggcagtgtggacaggatggacccagagccctagttcattctataatctccctttttaccaccctgcccagaagctcactgcggggcacttcccacatacctttttaaaaaccaaagatgtatatatttttatttatgtgtgtatctgcatgtatgtacaccacatgcgtgcaattcccatggaggccagaagagggcgactgatttactcaaacattttctgctttaaatattggttttaactttaagaaaaccttctgtctccgttgcttttcctgatgctatgataagacactctgacagaggtaatgtggggacattccctttggctcacagtgtaatgtgtcgtcatggtgggaaagtcaaagaaacagaaattttgactcagctgttcacatagtgtccacggtcaggaagaagagaacagtgaattcctgtgctcagattgtttctccttatattttaagatttattttattttaacttatgtgtatatttataactgcatgtgagtccaggtggctgcaaaagcaagaagagaatttttgtacagtctagaaccccactcctacgaatggtgtcacccatagtagacagatatttccactttaactgaacaactcaggataaccaccccagtatgcctagaggtctgtctcccaggtaactccagttctcaccaggttggcagctgagattagacctcacaccttcacatagaggactagactattgcccaataagtgaatgccatgacccagacaaactgaccccaaatgagccaccacagggctctactaaaacttcaggataagcatggcttagataccaagggaaggaatgaactgagtattaccagctggatcaccacccaggtgatagactcctacatccaagggatgtagacagaacaggtgcttaggtgagacagaaaccacgccacttttgagtgagtgagttgaacgttttgtcccaacctctgtctgcttctgactaccctggaaagcatacagaagacaaggaataagattaaagttcttcatatgaacccaagacacgaatgaaaggtttctatggtgctcttccatttaaaggcttatttttatgtgtgcctggcatgcccagaagagagtgctgagtctcctggaggtagagtgatgggcagttgtgagccaccccatgtgggtgctcagagccaaacctgggtcctctggagaagtagtatgtactcttaactcctgagccttctctgtagctgtttctgcatccaccttaaaggagaacttctctcctaagacccagcgcagacatggaagaggagcaagtcttcagtctactattgggggccatgaagctatggagccattgactggacaaccttacaaaggctctctgatgtctaagtgtggcaactactaggatggagttgggtcttgagatatgaaacacaaacagaagggcagacacccccttcaatgacctcactgacagaaatagaccctgtgtgatggcttgggtccatccaatgaaggataattgctcacaagtgattacatctaatcaatgggctaatccattgatggactcataacctcatcattattggaaaggggaaggtgggtcttattagagagagtaggtcatggggtcatgcctcggaggggttcatcttgtcctggcacccttcctgactgcctcttcctcctaccatgataggaactgttttgccccaccatgtcttccacaccatgatgccctccctcacctcaagccaagagccatggttgatcttcagctggaatctctcaagctgtgagccaaatctttaccccctctatctgtttatctgagaagttttcccacagcaacagaaatgcaacatgccctgatgttagttatctgttgctaggtaaccatgaagatgttagatatctgttgctaggtaaccatgaagccaaagcagcatcttagtacagcatgcattgaccatcaggtgctttggggacattccagcatagactgtgtgctagataagatggtatcatttttaactgtccagggagtgatggctatgcaggaccagtatccttgttcttaaattacaggtgacaaaatacttatgggtgaagtgtcaggctgctcacctcacaggctgcttcccaatggtttcaacagtgtagcggtagttagttgacccaatgggtcggatgcacacacacacacaagagctatctggattcttgaaagaaacacacacacacacacacacacacacacacactagcttaactttgaatggcatgactagcttaatggctgggcatttctagtccttcccgctgctggcaaacactcccctctgctactcctgagttaacacctattaagatctatctttcatctctgctgccccaaacaccattggggaagtggcccatgtggccattttccctgattctcacatgtcggtgagcctttagatctgatctttcttcttcccataagggtgatctctgcctccttcccctttcctggttcctagtccaggcaaatctcaaagtcccgccatagtctacctgaccagccattggtcattggctctttattgatcaatcaaaaaccaattgggaacaaggaccttcagcgtttggacaggcagattctcaattttgggggccagaattcaaagcattagaaccaattcccaacgggacagtaaatgggcaaataaaatgttgcttcttaaatactgtggcggcggtgggggttaacgggtggatgacaccacgtgaatggatctcagagaaataacactgagcaaagcagccctgaaaagtgtcacagtatgctctccctgttaatgagccattccaaacttcagtggcaaatgcaaaagtaacatctctatcctgttcggtgagctgccagtggactgaggtcaatcgcctgacagagccatgaagcataaaccagggctcccagtcacaaaccaccgcctcgaggtgtctgaggtatggacactggtctattacatgaatggtcagattcggagatgtttgggtgtagtgcagtctcccttccttataagccctactttcttagagatgaagtgaaacaaaacttgtttcctgcctccccaccttttttgaaggcagggcacaaatgcaggaactgagtcctgtcaaccagatgcacgcacctgacacttcaactcaaaagagcagcataagggcaggggattcacactgttactcattcccctggcaaagggcagtggggaagagaagcagcgactggatttggggaagcagaagtcacaggaggagttcctggggcagaagtggccaagcaggtgacttaggtaactctgcatagaagcctagttcctctccacagggtgagcagcaactagggtgggggttgggggaagggggtagaggctatcttttgggtctctgtgtggttctgagtaggtctctttgcctaaacaagaggagtctcccatccattgctccacatttcctgttgaaaagcaacacacacacatacacactttcttcaaaaacaaaaagcaaaccgacaaacaaagaagtagatatttgcatttgtaaactgttcaaatagaaaacccaaaactatgtacaaagaaatggtcttggttgtgacaggcttgctgacatcaaaggtccgtgagacatggtactttgattgctactgtgtgttcgtatgctgtaaaacagaaaattaaaagacaaagttgaaaaaacagtcttaaacctgcatttacaacaacaccggaaatatccagttagctgtg

SEQ ID NO: 203 - DNA, 806 bp, Mus musculus
gccgagccccgctctgctgagatgctgcgggcaggagcacctaccgccggctcgttccggacggaagaagtccacaccgggacaaccatcatggcagtggagtttgacgggggtgtcgtggtgggctctgattcccgggtgtcagcaggaacagcagtggtgaaccgcgtgttcgacaagctctcccctctgcaccagcacatcttctgtgccctctcaggttccgctgctgatgcccaagccatagctgacatggccgcctaccagctggagctacacgggttggagctggaggagccgcccctcgttctggctgctgcaaacgtggtgaagaacatctcctacaagtaccgtgaggacttgttagcgcatctcatagtagctggctgggaccaacgtgaggggggacaggtgtatggaaccatgggagggatgctaattcgacagccctttaccatcggcggttctggaagctcctacatttacggttatgtggacgcagcttataagccaggcatgacccctgaggagtgccggcgtttcaccacaaatgccatcactctggccatgaaccgagatggctctagtgggggtgtcatctacctggtcaccatcacagctgctggtgtggaccatcgagtcatcctgggagatgagctgccaaaattctacgatgagtgactgatccccagaagtcccttccttgtttgtaataaactttctggaaccagaaggctggtgcgatgggcaaaggtgaaatatgtgtatcagagagacacggtgtgtggagggaagcgtcctccccg

SEQ ID NO: 204 - protein, 226 aa, Mus musculus
AEPRSAEMLRAGAPTAGSFRTEEVHTGTTIMAVEFDGGVVVGSDSRVSAGTAVVNRVFDKLSPLHQHIFCALSGSAADAQAIADMAAYQLELHGLELEEPPLVLAAANVVKNISYKYREDLLAHLIVAGWDQREGGQVYGTMGGMLIRQPFTIGGSGSSYIYGYVDAAYKPGMTPEECRRFTTNAITLAMNRDGSSGGVIYLVTITAAGVDHRVILGDELPKFYDE

SEQ ID NO: 205 - DNA, 26008 bp, Homo sapiens
tgccccgacctgcattccccggggtaaagcgagctctggagatcgcatagagaaactgtagtgtcctgggtccgagcgacgcccgcttcccgcaaccgggagagccgattccggccgctgccctcggggggctccgcatacatctagtagcgccatgaccgcccagcacccagagatctgtccgctctcggaggaggaagtgaaagcgaaagccacagatcgaaggggagggaacaagactcttttccacatccccctgccttttccgagaaaaggacagttagtgcctggaccaggaccatcacactggggaccggcttctctgctctcccgttatgggggtcgggggaatgatgggtcaagggtcttccgaagaaagcgagaaaggaacaggcgccttcaaaagcccacttggcgatgggttacagtaagaggtacctccaggcccgggcatccgctggaaacaggggtgggtagggtcgtgtcatctaaaggcgcagcttcaaccagaagactagaagtcagccaggagctgggagtagtgtcacgcggggtgggggttcctatgagcatcactttacaaaaccaggagggacggaagtgcgagggggcagagtcttggaaacaggtcctgggccaactgcaacagaatatacccgccgcgtgtaggggaaggcggcgccagggagagggcgcagtctctgaatctttccacggggtccatcctagggcccctccaggttcaacggtctcctaacctgtagtcacccacaagagcgtgccctttctgcccgcccttcctagcgttgctccctgcttggctgagcactgcggagtttcacgcctctaaaccccgcctcttcttgcaacctgtgttggcctcatctacccagcaactgtcgacgtcacacgacctgggcctccctgaatgggagatatttactaggcaatcccgcctactgttctgaggtttcccctccaggtgcagcttcagagccaggcgagccaggaaggaccagcgggcgaggtggtgagttgtgaggcgcgcccagtccctctgttcccgcctggcacttgctctggccgcgcccgccccatctgccacttcggagaggccacggctctgagctgcggccgctagtgccctgatgggccctgtggctggggtcttgcacattcttgggggtgggcctaaggggataggggaagtggaaggggcctcataggaattaaaaagcttaagggaaaaggtgatgcagttagggggtaaaacattgaggatgataaaagaggagacatccgcagctgaaaagtgcgctgcaaaaggcagtgggccgtttggtgtgccggaaacataagaaaccacagtacaaaacaccaattttattataaatatcaagaacctacagggtgtttatgggccagcatatgccttcagttatgttgaaaatagctgatcatctttccgtacattctgaacatttctcagtttcagagtgctggccacaccaaagcatcagccctggctctaaactccgttacagtaaggaattacaaatcctgtgtttgtactccaggaagtctgcattatcacgaggagcttggaaaggaggtaacacactcaaggcaaatttcaagtaactcatcctggaggcagctgcctactctgcagctgtggttctccaccacagagagaagaaaagggagggagatggagtgcgcaggtctgagaaggctttcattctggagcatctgcaggagcctgcaccatggcccagtagcacccctttttctccatgagctgctggtgggttcccccctcccggatagcgcctccttccagaaagaggatgtggtcagcctgctccaccaggctgaggtgctgggtgatgagaagcactgagcgggagtaccgctcagggctttcgtacaggagctgctccacctgaggaaagacatcggaccgtcagagccggggactaccctcagcccagggagacacctgtgtttccagggctgggactgacctcacaggatcactgctggctctgctaacaaccccaaggacaccaacgtttcccattctgagtacttctccgcaaaccctttgtttcattaaggactgttttacatgaagggtgcaaaagtaggataaaaatgagaaccctagggtgaaacacgtgacagaagaataaagactattgaatagtcctcttctctacccatggacttggcatttttatattcgattttaaggaaatataacttagtagtaaagagatgagcattcaagtcaggcagacctgaatttgggtcaaggctgcgccactcaaaagctatatgacctctatatgagcagcttattcaacctcttttaacctccattttgtcatctgtagaatgatgataaatgcctagctcagaaggattcctaatgaataaatgagtgacagtgcatgtaaacagactagcttaattaatattaatatgattaggatgggctgggcccggtggctcatgcctataatcctagcactttgggaggtcaaggagggaggatcacttgggcccaggagttcaaggccagcctgggcaacatagcgggacgctgtctgtacaaaaaataatttttttaaataaacgatattatgaggatggtcttttccttatgtttcgctttagaaattcagtctataggactgggcgcagtggctcacacctataaccccagccctttgggaggctgaggggggcagattacctgagctcaggaattcaaggccagcctgggcaacatggtgaaacccatctctactaaaaatataaaagtcaaccaggcatagtggtgtacacctgtagtcccagctactcgggaggctgaggggagaatcgcttgagcccagcaggttgaagctgcagtgagccaagattgtgccactgcgctccagcctgggcaactgagtgagacactgtcttaaaaaaaaaaaaggaaagaaagaaagaaattcagtctgtagtttgtagatagtctcttttaactgattctaggtgtctttgcctcgtcttctatctctactccttggggaggcatccaatggaactggatttgggaactgagaactgcaaggactggtttgtataattatgatgttagtaaaactaacagaagatgtataaaagaagcaagattgggtgggatatagccattaagaagatgactgcctcacctgtaactggctgtttgcatccagggcactggtggcatcatccaggataagtacacacggtttccggatcaatgctcgggccaacgccactgcctgtcgctgaccccctgacagctggctcccagcctcgtctacctctgcagagcaaagggccaagatgagaacggtatagccacatgtgtgcacgcatgtacatgcacacagacacactcatgcattcacgcactcacacacaccaagatctgacggttgtagctggataggggagattctgggaagatgaacagaatcctgaggatgtcaggatgaagaagccataggagcatgatcttacaacttcaaattgatgtccatgagtaaggaggaactgaaggataaaggcaagactactggggtttcagcaaaggtaaagatggctgggtggtgagatgagtggagagagtacctgtgtcatagccctgagggagtccagagatgaaactatgggccccagactttactgcagcagctgtgatttcctccatagttggcttctgggtcaggccataggcaatattttcttgaagacttcttccaaatacctgtggctcttgtcccactgcagccacctgagatgaaatatgatgaagagtcatagaacaaggcacatgggagtatggttatctagagatcgaagactcaaaatctttattgagaacatgtcacaaaatcatactacctccctcctgactacaccaccatctccacccaaggtctcttatcattccctaacccctctttcagagtgctcagtaagaatgctcttcgtatttgatgctccctgccctccttcaagccacctgcttccatacctgcctgtgcaggtagcggtgctcatattggggaaggggcttcccatccaacagcagctgtcccccggtgggctggtacagattctgcagcagggcagccactgtgctcttcccagacccattgggtcccaccagcgccgtcacctcgccagggcgtagggtgaatgtcagcccctagaggccagagaagcacacgataagaggctaccaaggcctctaaccttgagagtgtcattgccttgttacatagcatgatgtcttaccccagaagaaaaacagggaaatatagaaactcctaccctcccacatgcacagatttctgggtgatgcctccccaaggagtagagatagaagaagcggcaaagacaagggcagagacccagcaccactatgccacacacttgatgtcagataccaccaggaaagggaaaaatcacattccaaattacaaaggaaaaggaaagatggaagaccgaagacacagattttgctgcagcaattccttggaacgtgagagcactctcttcgaaacctcttctctcattctctttggaagcccaaactgggttcttgagtttggggaagatttatggaacagatgatgcctaccattgcctttaaagggttagggaggatatatgcttggcagtaagcaggctgaaggcaggaagaaaatttaggatggcagaattgcagttggggccagtggaatacagggagtggtaggttgtacctgtagcactaagacatctgggcggtttgggtaggcaaaggagacatcttggaactggacaaggccctccaagtgtaagggagtcaacagaccactgggtgggcagcgaggggtgcggtccaggtactcaaatattttctctgaggagcccacagccttctgtactctggggtagatggagagcagtacctagagggaggtaagaatagtgaaagtgaggtagtctgcttgccagcattatgtgaagcaagaagggtaaagaatggaaggacatcacacagatggtgctgggccagaggaaggaatcacactggggagtgaaggtggagggacctcacctccacagcctgggtgaactgcatctggtagagaacaaatgtgacaaggttcccactgcttacagccccactggtcaccagctgcccaccaatgtagaggattcccactttcagcagcatacctgaaatctataaagagaccacaaaaaaagggactgaggtagagaaatctggaggggacacaaagaaccacagtcattaacctgaaggaaatatcaagtccctgtctcctaagtgacatcggcaggctcaataggcagacaggagaatgaaccagagaccccatggagtctgactcaatgcacatcatgcaagtcacagttatcttcaccaccatcaccactatcaccttgtctggggagcattttactcttcacaaaaggctttcattcatgtgatgtcagctaatacatgaagagccttataaagaaggttatatcactccatttttgaaaaatgaggaaacaaccagtcgggcgcagtggctcatgcctgcaattccagcactttgggaggccgaagtgggcggatcacaaggtcaggagattgagaccatcctggctaacacggagaaacctcgtctctactaaaaatacaaaaaaaaaaaaaaaattagccgggcgtggtggcgggtgcctgtagtcccagctactcaggaggctgaggcgggagaacggcgtgaacccgggaggcggagcttgcagtgagcccagatcgcgccactgcactccagcctgggcgacaaagcgagactccagctcaaaaataataataataagtaaaaataaacaaacaaacaaacaaataaataaataaagaggaaacagtctcagagaaggtaaatttgttgtcatgatcacaagacaagtaaattgcatcatcaagccaggatcttcggatcactggcgtagctctctttccagtgcatcacagatgtccctcatccctggcttccactattcccatcactctcactaacaaatctacaaggtaccagcatgaagcagtcccaggtgcaagaatttatggcgccctgcacttcccctgagaggcaaaggaaggccctaggactggaagacacgcatctctccaatccacatggttgggtggattttatgtaccatactgaaaggaagccacctagcatctttaaagagagggagggggctagggacactgagtagagtcattgagcctcaggttgctaggacgaaaatactgaaccaaccatttcccagtaaaggaggagtgggagcagggtcataggaatgggaatggagtcacggcatcttaaggacaagggaatgggtattcatcttcaggtgctcacactagtggtccaggagttgactgcataggccacagcctccttctggttgagtgtctttatttcttgcagcttttccctaaacttctgggcttcgccctcctcgttggcaaagcttcgaactgtaggcatggccgacagagcctcaatggccacctggctggactttgccagagattcccgcacctgcacttccagcaactgtggatacatggacaagagatgtcacacgggttggcaaaccatcagggacactaatacctgagttacctatttggaaattaaaggtgagaagagacagaggaaaaggagaaaagagaaagagacacagctatgccccttggatgctaaagaaatacgaggaagaggaaaatgactcagaacgggttggggatcaaattcttaaagacagattgtggggagaagctagaaaagaagacccagagagtatggaggttaatgttgagcaacctgggaacatggaccacagggacagggtgttccatgaagatggagaatcagtaagggtgccaggaaagctggactgaaagcaatgtgagaggaactgagtctgccaagtctgggagatgagggtctgtgtagagcgggccaactccatgaacatacctggtaccattttcccaccttcttgggcagaaggaaaagcagaggcagggtgatcagggtgaccatggtgagggacactgatccccagagcatgatccccaagagacataggcctcgcaccaggtaccacagaaataagctcagattctcactcagagaatcactcagggtggacgtgtcctctgttacccgagacatgatgttacctgcagggttggggagaagagagtgaggtgaatcagacaggttccaagtgatgagacgaactaacaatgagccaggatgccagggtcaggggtgtcaacatggggttctaaggaggctgcaggaaacaaggttagggttctccagaggtctgcaaatctcagtgcagggaagatgagtgttaaagaggaaaggcctgaccttcattttaattataaagtcattaatgcacatgtgaatttccattttcctgaaagctttctgttccctagagaacctgtatgtcccatgctatacacacaggcaggaagagcttaaactggtcacataacagagatggaggaggagggtgctgctaggaagcatgccaaagtctgtggagcactcactgggactagggttctaaccccaggtctatctctagccatatgtaactgtacagcttctagtgctgctagaaagcatgccgaagtctgtggagcactcaagagaccagggttctaaccccaagtgtgtctctagccatatgtaactgtgcagtttcagcatttagggtcttggcctcagtttccttctctgtcagatgaggcagttggtctctatgagctcaaaatttccaggtttgaaattctatggtttctatctaaggatacataggaatagatttataagaaaatgctagatgaaaactctaggtttttcttaaggtaaggaggacaatattttgctcctgaggtatatcaagaatgagaaaaacaattgtgtgtgtgtgtgtgtgagagagagagagagagagacagagacagagagagagagacagggagagggtatatcaagaatgagaaggaacaatgtgtgtatgtgtgtgtgagagagagagagcggggaggggggagatcaaagcagatgtatgaggatatgaacagtacatggcgtataatgaaagagtttcaggagaaacctgtctggttctgttggaaaaactccgtctcctggcgcaggacagccccaaacacctctccctgcaagtggctgtgcacgtggcccatggtgttgttatagatcccgtcacccacgaactccagcactgcactataaagaacccggaaaaaaaggggatcagggtgtgttcagggaacagactgaaggtcccaggtatccccatataagtgcatttcggacagcagccccaacttccaactccctcatttgcagggtgccccattttcagcccccagacctggctatggtgagaatggacatgagagttaagtttcgagtgaaggtatcggctgagccatcttgtagaatccagtcagtgaggcggcccgtaaagaatggaatggccatctcccctggagaaagagaagagaggtcacgcacaaatattaagtctaagtaggtcagttccagtcagactggccccaccacgcctcctccccctcaccattatcctggagggcatcagcagaaaggaaacactgacgtctcaatcccgaacctaaataggctgccctggaactcactaccctgtggttgctctaccagaactttcaggattttattaggaaggctggagatcatgaagtagaaaagcctcctgttagagatgaggatgccccgcccttcggccccagagcaaaggatttccccgcttccggcgtggcccaaagaatcaagacccggtcagcaatggagcccagaacctctggcccccgccagtccagtgccgtttcttctacaccgaagtggtgttccaagacccacgctaggagtccttctcctgctccacatttcccagaacccacgctactctaccttactgacaattacctttgattcctgtcccagtccccttgtgtcctcccctcttgccctgcgttccccttaccaagagaggagaggaccaccaggaccaggaacagcgagaggcggcgcgtctccgagcccaggcagcctagaagccgacgcacagggtttccagagccgccctgaccgccgggcacccagaggctcccgagtttgtgccacagggctgctgcgggcagtgccgctgcataactgacaacgaaggcggtagggtgacttccccagtgcagtagcctggtgctatccgcggacccgggggctccccatgagatcagctctcggaacaaggcaagtcccggcagggccaagcccagtgccgcagctaatggcttcaaagcagccagccagccctgggcacctgcgttttcgctcttggagccaaccgttgccctgaggaccccgcaggcccccagccagagcacggcccagcggctcaggcccaccgcccagacccggagcagtggcagcgcggtgggcaccagcagggagaatatgcggggcagcgcggtccggagcagcacccagtcggcgagaagtagcagtactgtccccagccatgcgagagaagctccggggaggcagcggcacccgcggggagcgggacacctagagctagccattggcactcggacgccgtcccggtcccggccgggcctgggactctccgcgccccggtggggcctgaagctccgggtaccgccgagtcctcccctactggcggctgggggagggaacgagggcggggctctcggaaagtcccaggaacaggctgatcctgcgctggcgagaagctcagccatttaggggaaagcgaaatcgaaagcggccgcctgctcactagataacgcctacttccaaaagtggcctgcccagactattttggtagcaagcgtggaaatcagatctgagaatctcgggagcagccctggtgcccaattttctccatcacgcacacccttctcgcctctccctgcctcctgcctttccacttgcaccagttttcccaccccagcctcagggcggggctgcctcgtcacttgtctcggggcagatctgccctacacacgttagcgccgcgcgcaaagcagccccgcagcacccaggcgcctcctggcggcgccgcgaaggggcggggctgtcggctgcgcgttgtgcgctgtcccaggttggaaaccagtgccccaggcggcgaggagagcggtgccttgcagggatgctgcgggcgggagcaccaaccggggacttaccccgggcgggagaagtccacaccggggtaatgggtctgggcttgagggttggcagaggggtggaggagatgcagcggccaggggaccctggaagcgcgcgcggagaagtgaatgcagagaccaacgggagcgcagggaggtcgcctgtagcagccagcgcttgcaacccgcaatgagcatagagtatttcttttctgaggggggtcgtctagagtgtccgtgaagggaacaggcacgcgaggctggtggaaaaagcgggtgctttgactcttagctggaagcgtcaacgggaagctactctaaagcgctttcgctttcactctggtcccggacagtgggggctggttaaatcaagaaagggggttggggatggtgcaaagagatgaggaaatggtgccctgggtgaagtagaacagcacttgggagaaggaaatataggcacttattgagaaggaccaactcatcacacagacttttgataaacttgccactgggcaactcttagcccaagcactgataatgggcgttctgtgttaactagtgatgcccttccctagcttgacccaggaaggcctctccttggcccagatgctgccttactcccttccctgtgtcttccctgcccactcccatgtgcccactggggggactttgcttaggatgggcgcctggggcagatggcagccccaagactggctggctggcttctgctctggactactgccaccactcgtggcttgggggcggctttgttagagaggaatagcctctaacttgaagttaaccctgttctttgaccctctattcatgataagtcggtccgtcggaaagcatactcagaggagcgtcctttggggccagagtaacttacggcctggtaagaaagacacagtgaaaccacttataatttgggaaatctcccctcactgccaaatgagcagtggcaagtaggaagtagaagtggaaacaagggataagagttagacctgaattttagtcccaggtctactattaactctgtgtgactttgcataagtcgtttgcattttctgtgacttggtttcctcatttgaaccgaggatctttaaggctccttccaactcaatagtagaataaatgtagctttatcttccctcacttcttcttgattcttttcttgacctggaaaagtcagcttaaacttctcagtcaaattatctcttggtacaaatttacctccctggctgctgagatatgtatttacctcttgatcggaaattccataactgaaacttttattttcaaccatctgtatgtgttccttgctgcttctctcctgccttgcccctggccatgctaaccactgccctcctcgattttttccaatgttcagtaaattggaagagctcacttctgatgaaatggggggtgagagtggaggattgtggaccaaaaaaaaaaaaatagactgaccttgtttcccaagatcatagtcaattactctgtgttgggtctacaccacatctgcacatactatgagcccttccgttggagataattttcacttgcggagctgcttcacttctacctgtaggagcctcatctccacctctctacagtggagaggattccactaggcaagttggaacttagggacacagttctttctgtgttgtatcacagctgggctgtggcattcccctgcagccggatgaagcaatagagaaagtggaaagatgaagggaaaaaaagcctgtactgacagtcagctctggcctgttactgtgtaatctttgagccagtcacttcgcctctctgggaatgtttcttcttctctaacatgagggcatcaaggctgttcttgccctgacattccatattctgtgtctctgcagaccaccatcatggcagtggagtttgacgggggcgttgtgatgggttctgattcccgagtgtctgcagggtgagtaaaagtgaagatgtatgcatttggaaagaagctaatggcctcaaatacacactttccttacccattcatgaaaagactggcaaactggagccttggaggaatggagttgaccttccccaaaagccactatgataagctatttggtgggtgcttgggtctctgaatttgtggaggaggatctggggtctgaatgtgtatgtgacctgtcccagtagtgtacagggatgagtaaaggaatagggtctgagagggggacaggagatagatttttgagggtcttctttccatctgtgcttagggatcaaaaagatgattctgtcaagcagatacctggtttctcatttaccatatattgaactattttgtctcttctcccactcctaaccaatttcctcacatgcaaaatgagtatatggggttaggtcaatattactgacattatgttccatagaacataactctctcaagattgttaatagcaaagaaaattgatgaggcatatttttcttaccttagcattttttgctttgttataaaatctaagcctgaaaaataagcctaattttgattaacatctgcagtgattaataatatctgagatgattatttgcctcctgctttaatccaagcattaaacttcatgctattctcttgtcaaagaaatttgagagacattgaatgatcaccctcaaaaattcctgagttctggttgggtgcagtggctcacatctataatctcagcactttgggatgccgaggtgggcagatatttgaggtcaggagtttgagaccagcctggccaacatgttgggaccttgtctctactgaaaatacaaacattagctgggcttggtggtgggtgcctgtaatcccagctattcgggaggctgaggcaggagaatcacttgaaccagggaggcgaagtttgcagtgagcccaagattgatccactgcactccagcctgggtgacagagtgagactgtctcaaaaaaaaaaaaaaaaaaaaaaacctgagttttaacttggtgactgttgactccctcctgacagcgaggcggtggtgaaccgagtgtttgacaagctgtccccgctgcacgagcgcatctactgtgcactctctggttcagctgctgatgcccaagccgtggccgacatggccgcctaccagctggagctccatgggtatgaagctctggagttctgactccccacccactagagctcccccaacctgcatgaatccctgtacagtgtgctgttccaggagctggacactgggaaatggaaaagtcttgtttcggctcttgctggcacttgaatctgtcagtttctgcatctgtaaagtggagataatatagtacctcatgagacggttattttgagaaccacattctatatgtgaacacagtttaaaagctgtaaatcactatcctgatataaataatcaggaagaaggtgatattgtgacccaccataatatcaggcagttaccatacgagaaatcaaggtcgttgggacggaagtaaccttatctgcttttccccataagagcagggtccttgcagccaaaagaaagttatgtgggtggggctgagcaaaagagtgagcaattgaaagcttcttaccagttggtggtgtgggactctggttcccctgtacatgtgggagggaggctgcagtttgagctattgcagttacagttttcaggggtcgtttagcagggatgatggtaacagtataggagaatgagacttaaaattctatcaacctttattcctaatatttccctcaggatagaactggaggaacctccacttgttttggctgctgcaaatgtggtgagaaatatcagctataaatatcgagaggacttgtctgcacatctcatggtagctggctgggaccaacgtgaaggaggtcaggtgagtttctcccaaagcactctctcctctgggcttccccactctcctgcagaggaagatggaagtcctatgtcattctagcaatgagttccaaggacactacctctgaaagcatagtactttggggatatgagataccagggcttcattgcagggtgcagagaccacttaatgtctcagtgggaaggaagggcttgatgattctttaacctgaggatccctttcccaggtatatggaaccctgggaggaatgctgactcgacagccttttgccattggtggctccggcagcacctttatctatggttatgtggatgcagcatataagccaggcatgtctcccgaggagtgcaggcgcttcaccacagacggtaaccagccaagtggaagggtacctggggagggctttgaaacatgggaaggaagtagattatgaggaacaggaagagaaatacaggggtggccatttaagttaatgccgggcctggtacacttttaagagtgaaaaggggcaggacaaatgcaaagctcaatggggttcttgggcaatacggataaaccagggctgttctgagtaaatcaaatgaggatacacagtcactgtgagaaccagtggtgtgctaagcacagtggctcacacctgtaatgccaacaatttgggaggctgaggcaggaggattacttgagcccaggagtttgaggccagcctaggcaagatggtgaaaccctgtctccacaaaaaacaataaaaaaaagtaaaaaaaaaaatgaactgggcatagtggtgcacacctgtagtcccagctactcaggaggctgaggtggaaagatcatctgagccggggagatcaaggctgtagtgagcggtgattgcaccactgcgctgcagcctaggtgacagagagagaccctgtctggagaaaaaaaaaaaaaaaaagaaccagtggtgtgctgaggtgtgctgaggctggcttgggaccactcatgagagcggactgttaaatagtcaaggatttgtgaactgcttagctatttgtaacttgcaattcatcatagcgggagcatttacaccacggacatcagcagatgccacatatggaagcctttttgtaaaaaaactgatttaccagcacaccactaaatatgccttcctggaagatgagttttgaggtgaaagtggtagtaggcatatggatggagggggagtaaaaagatttttgaagctaagccatcctctctctccctctctccaacttgaaaccctctgcagctattgctctggccatgagccgggatggctcaagcgggggtgtcatctacctggtcactattacagctgccggtgtggaccatcgagtcatcttgggcaatgaactgccaaaattctatgatgagtgaaccttccccagacttctctttcttattttgtaataaactctctagggccaaaacctggtatggtcattgggaaatgagtgctcagggagatggagcttaggggaggtgggtgcttccctcctagatgtcagcatacactctttcttcttttgtcccaggtctaaaacatctttcctagagaaaacaaaagggactaaactagaaatataaagagccctatacatgacaggtgatcacgtactgaatgattttgaagtagtacaaacaataaaaattctcattccgcatcatcatgcggtccatgatgatgaggccgcaagtgaggtgatgggactctttcctttaaggctaagactgacagataggcaagacacctacacacatgagaattagctaagactatcagcaaactcgcatgtaaaagaattcctttcataatgcattcattcatattaaagggcaatacatgaaaaatgcttaaatattttggggcacttgtgaatttcaaagaataatgacaataaccaaaagaagctacatttgtggcattggctaaatgttttataaattttatctcttaaaattcaaaccaaaaaaccccctgtattcacacctgtaatcccagcactttgggaggtcaaggcgggaggattgcttgagcccaggagttagtgaccagcctgggcaacatagtgagaaccccatctctacaaaaaaatttaaaaattagtcgggtgcggtggtgcatgcctgtagtcccagctgcctgggaggctgagtgggaggatcgcttaggcctgggagtttgaggctacagtgagctgtgattgcgccactgcactctagcgtgggtgacagagaaagaccctatcttaagaaaaaaaaaagaaaagaaaaagaaaaaacaaacaaaaaaaacacccaaccctatataggtattattattacttctataggacacatagaggtttggaaagattaaatcacttgaccaaggtcacaaaataagttctgaggctgggatctgggattcagtcttattatatgcccttcctctaccactccctaaaacttctcattccctcaatccccatatatcatcttaaaatctgcaataaatagccccatacattcgttggcacttaggaaactgttaccagatggctgagtaactgtattaaaacaaatttaattctgcttctatctttgccttgcacttcctgagtgacaggagtgaactctcatatccttttctgtcaaaagatggtgctgaatgatttctaaggtagtttacagttccaacattcaatgccattttgctaacaagtgggcagtcaacaggcatattcaacagaaatactagtaggatctcaggctaaacatacgaattcaaaactctaaaacaatcacatccccctggagtgtaaagaaaaaaatctaaaattacaaatgcctggagttgtttctagccatgatatttaacttatttgagattttaaatagcccatttttcccactgatcacaagtagaaattctgggcagtatacaaaaagcaagtactcaaggactccaaaaagtaaacaaaagcaggtggattgtgaagagggtcaaaactgggagaggggcccctcctggggagtgggttttcaatgttttccccttttttcctcccagctctgccctgacgtcaggcctcaggtgcagagctgcactgcgtggtagcacaagccctgagttaacaagagaaataccggctttctggccagaggaatgaagaaaaagggcccctgcgggcaggaatgtgtaggggaatctccaaactgagagtacaggcggaaattccctaattctgagtctgaaccctcaggagtaccaggttacccctgagctgcacatgcgtgtgacatgccttaagggcacagcaaagactttgagaactgaatgaagattagatcttttaaaattggaagacttcggccaggcgcggtggctcgtgcctgtaattccagcactttgggaggccaaggcgggtggttcacctgaggtcaggagttcgtgaccagtctggccaacatggtgaaacctcatctctacttaaaatacaaaaattagctgggcatggtgcctgtaatcccagctactcgggaggctgaggcagggagaatcgcttgaacccgggaggcaaaggtggcagtgagccaagattgcgccattgcactccacctggacgacaagagagaaattccatctcaaaaaaaaaaaaaaaaaaaaaattagaagacttcatttttctgtattggccaaataactgttctaatgcccttcattccaataaaaggtttgtagcagcttacagagataatttaaaacaatttttaaaagaagaaaacaacactgggtcagagagaaaatatggttaagaaaagtaagtgaagccaaggagtgaaactaatggaaactaatggacaacgtgaatatcttaaaaaaaaaaaaaagtggtgcgctgtcttatactggctagcaagagcagattgcaaagtattcaggatttttgaagacagttgttaactattggtaacttgatattgaccactatggaagtatttatactatagaaatcagcaatgctacaagtcagaagcattgtttttcttcagagagccggtttaacaggacacatatttatcagccaactataaatggataaaaaataattggctccaggccataggatagtgaaagcaaagaaggaaataaaatgaggtacaagattcataaaattcattttttaaaagttgccagaaaaccaaaaattatatataatagttcaagccacacagaacatttactcaaataggacatgcatcattccataaaggtaacgccaataaattccagagtatcggtatcttagaaactatctatattctaggccaggagcagtggctcatgcctgtaatcccaacattttgggaggtcaaggtgggcagatccctagagcccaggagtttgagaccagcctgggcaacatggcaaaaccccgtctctacaaaaaatttagctggatggggtgcacctgtaatcccaactagtcagaaggctagacgggaggatcgcttgaacccaggaggcagaggttgcagtgagctgagattgtgccactgccctccagcctgggcaacagagtaagacactgtcttaaaaaaaaaaaaaaaaaaagaaaaagaaagaaagaaactatattctgcaaccatactgtaataaaattagaacttgataactaaaatatacttaaaattgtaagtgaacaaatatatttatcagtaacatggatttaaaaggcagtcgtggatgggagcatcgctggagtccagaagatggaggctgcagtgaggcatgattgcgtcactgcactccagcctcagcaatagagtgggaccctgtgtcaaataaataaacagcagttataaagaaaattaactcttttagaaccaggtgttaaaaatgttacacataaaatatacatataaaataatattataatttcaaatacatttattagaacaagaaaagttaaaataaaggacctagaaattctactcaaaaatttggaaaaagagaagttgagcaaacctaaagaaatacgaagaaaaggagttataaagataagaatagaaagcaatgaaacagaaatagagaacaaaaaactaggtagtgaaaattaacatacttttgattccaaaagctgcttacttaaaaatatttgtaagatattcagagttacaacaaggccgattatggataaagggagaaaaaatgaataaacaaatacataatgaaaaagggggaacagctacagatatgacacagatataaagcatagagtgttatgaacaagtatatgctaataaatttgaaaacctaggtgagataagcaaattcctagaaacatttaatctatcaaaattagcacaaaaagaaatacaaaacttgactataccaatgagtattaaagcaatttttaaagttatcaatggcatctaataaaaaaatatatttttgaaaatgcccagatggtttcacagatgagttctatcaaacattcaaggaacatgaaacttctatattatatactttttccagaaaacagaaaaaaactaaacctgattagctaattttatcagccgagtgtaatcttgactccaaattgagttgtggaaaactcaaggaaaaaaaaataatagacccatttcaccttgaacacagatgggagaaaaaaataattatttatgaaccgaattcaacaatattacaaataataatactgggaggccgaggtgggaggatcgcctgaggccaggagttcaagaccagcattgtcaacatactgagatcctgtgagatcctgtctctacaaaaaattaaaaaattagccaggtgtgatggtgagcacctgtagtctcagctactagggaggctgaggcaggaagatcatttgagcccaggagtttgaggctgcagtaagctatgattgcaccactgcatttcggcctgtgcaacagagcaaggccctgtctctaaaaatatgtataataataacaataataataatgattatgctaataatgatacatcaagatcaaatagggaatccttggaatactagggtggttcaatataataaaacatattgttgctataatttaccatattcatagaaaagtcatttcctttgctcagtctattaataaaagacatttggtaaagtatatccatttgtgatttttgaaaaacagttaaggaagcaggaatcaaaactttcctattttggcaaaggttataatccaaaaaatctgtaaccactagtatacataacggaaaaaccttgggtatccaagacaagaatgttcactataattactagcttatcatagcactaaagcctatgggcaacataacaagaccccatttaccaaaaataaatttaaaacattttaattagctggcatggtggcatgcacctgtagtcctacctacttgggaggccaaggcaggaagattgcttgagcccaggagtttgagcttactgtgagctgtgatcacaccactgcactccagcctgggtgacaaaggaagaccgtatttctaaaaaataaaaaatacaaatacaactacaaactagcactagaccaacagtgactatgtaccatgaactgaggaatattattaattccaccatttgcatctgaggttaacaatatgtcaatgacttaaataacatcatatctctgagagtaatttctcctatatttccatgacaaatgttagataattttccattttttccattcaataaaataaacaggaaatataattaaagagttcaattgaggattgggatttagaaaggaaggcaggaattaagaataatccttagttctcttcctaatttgcacctctctcactgatacatatgtattattttctttttatgtcttttagaatctaataaacatgttttatattatataacaaactagaatatatggattatctttggtcttccttaccaagttcttaactctgctggctctggggcactggacataccatgtaagaagaaaaatgttttaactccattgaacttattcagaagcatcggaaattggttcagcaatattcaactttgcccagcaatgtttatgaaagtttcatatatagtatagtataagtatgtgtaatacagaatttatgttctcaaaaatgaagagataaagtatggagattctaaactctgttgacatagaagagggtggatttctcgaagaaacagccttctatagaaagtggcttgtatgagtcgggattctccagagaagcagaaccaataggatgttggcagagagagatttattttaagtaattggctcatactactgtgggagctggcacggtcgaaatctgcaggtaggctggagacccaggaagagctgatgttgcggcttgagtctgaaggtggtccagaggcagaattccctcttccttggaggacctcagtctttgcccctaagaccttcaactgattggaagggccacttacattatggagggtaatctgctttacccaaaatctattgatttaaatgtaaatctcatctaaaaaataccttcactgcaatatctagactggtattcaaatgtctagaaaccatagcctagccaagttaacacataaaattaactatcacttggctcaaggtgaaacttccagatcaatgtggcaggagtgttgaggaaggaagtgaactcggttctaaccaagtaggacagccgaatcatcactgaagtgtggcactggcctttcgccaaggtaacatgtggcaaggttttaggttaggataggtaccaggcaaaagctgggtgactcgatggaggcttttgtgccaaccttcagagactggctgcgtcagactgccctcaagagcatacaaaggaaaaaaagacaaattaaaagcctttaatccaaactcaagacatgaatgaaaaactgtaaatgcctctatagcagttttaaaggctatcttttctcctgcaacccagcacagatatggctgagggtcaagcccgggggcttatgataaaggttatgaagttgtagaaatgtttgttgcatcatccaacagcagctgttgtgataaggcaagacccctggttgggatagaccggaccctgagatatgaaatagggacatatgagcagacacagagaagtctgagtgagaactatgaatcaccgcaccccctgagggtccttgctggaagaagcagactcaccgtattagttacctattgccatgtaatgaatgacacccgcttaaaataacagacatttactataaggtgttactgggacaataggggattttttaatatggattgtgtgtttgataatatggtatcaattttaagtatcttgggggtgatgacagtattagggttttgcaggagaaatgtccttattcttaaattatacatgacaaaatatttaggggtcaagtggcataatttccacagattactctcaaattgtttaacaaaatggttcttcaacagtaaatggataaacaaaacgtagtctattcgtgcaacacagtactatgtaaacaatgaaacttcatcaactactgaaaatgtaacaacatggacgaatctcatagaaacaatattaagtgaagaagccagacttgcagaaatacatactgtatgtttccattatctattgctgggcagcacaccaactccaaacttaatggcttaaaacaaaaataatcattttattatctctcatgaatctgtgaattactggactttaagagccactgatgtagtccatgaaccaaaacacatattcacggcagccactccacccagcacctcacacctgtgatgtttactggctgcccatgggatttgaacacctttagagtactgtgaaatttcccctaccttttgagtcctgcctccctaaagtggaaaccagaaagctcacttcccctagccttctttgaagctagagcacctaagttccaccaattaaattcatccacctaagacttcagttacaaaggggccacaggaggaaccagggtgtgggggttgcagagcaccttttactgtatttatttctctggcaaaggtgacagaagaagcaactgtcttttggggaagcggtgggttttttccttttttttttttttttttaagtgaagttcctgaaacagaagtggtttaggaggtgtcttcagtggtggctgcagcaacctccaggtcctaacaacagaaccaacagcagcgtctagaagccatggggcagcagcagtggtgtggctcatcagacctgctctctgcgtggtctgaccctgtacatacatgtgcctctcatccgtagttccagcatttcctctctaaagtctagttctgagagaaatttctttggtagacttttcaaagttttatcaaactcaaagagggaaccagcaagaatacaagagccttgatccaaagagtatttgaaaaacagagctgtatctctctgtgaggaaataatttctaggctagagattcaaaatggctaacgtgctagagggcaataaaatcataaccttggtgttatcttctttaccggagaaaaagagaaagccagcatcccttatcagctctctgctgattaacctctaatcgcacagggctggccgggttcgtcttaggcaaattacaatccctgaaacactctggttttgatcaggcagaattatgagcaaaggttcaagtgtgatataaaataatcaagcacgtacaattttgccttatttataattttgaaacacttttcctacacaatttctgaccttaaggggcagaattaaccaaataaaacttttcagaaatgctctaattcagttccactcattttatcgtctctatttggcctgttttagggctaaacccagaagcaaaatcttcttcaaaatgaatgtattgacagtcaccatgccagacttggagtacgaacaagagcatccttttacccttactgaaacctatgtggtcactaaaacatatatcaataatatttttaacctggacaaaattaatctagaaaattgagctactgttttttatttgtcagcttttaccacattgtgggtttgagacacaggtagttcttttgatagtacagcgttaatttaaaatataaaaatcatgccaaacacatctaattacttttagcttccttcacagtaggcggaggaaggtgaaaaattaagccttttgcgccacctagtggccaaatgggtagtggctgtctagtgagaaaaaacaaagatttgggggcgtgaaaaatagcttgacagtgttagtattctgaattcagggtatgaggttggaagaaggcaacaacaaaaaagaattttcagagaaactggtcacttaagtgcataggtacctgagagtgagcaattgttataactttgatatctcaataaccagagtgacaataaaacatttgaaaataaacataaagaaggtaacaattataagaaactttaggtgtttcagaagcaaatggttttttgttgttgtttgtttttaaaataatttaaaaacttgatgctatcagcacaaagcactaaaagttatcaaggtattaagtgagagcattctgataagaaaccaccgctagctgggcagattatgctaaagggaaagaaaaagttttttctctgtcttaagtgtagagtgtatattccaagatcaattttaaattacaaatcctctccttttttgcttattaattcgaattcatcattacgtgtgtgttttacagaaatacatatatagttgaatgacaattttgtttaaaactttccactttagttttaaaacgtagttaatcttatcaatacaatacatgaatgtatatccacactaagtttaccaccttaatttgagttttgcaaaaattaaatatggacaaaggtatatatatagaaagccacttagtgacccaataatctttctctctatgatacacttaagaattttttagacaataaaaagtcacttattaactagctcagtgaaaattagtccaaagtaacaaaatcatttgaggctgcaaaacaacaatatcactattgatattaggagtttttcaaagaggtaaaattctaaaatttttacatagagtgcaagctaagtagctaagtcaaatgacttgcaatatttttctgaaattcacaagagccaatagtttaaaaaaagcatctcataacatttaattaaaaatatacattttcatttaagtttgcttcccacaaaccactgacacactcattgacacagtgaatgagtctagtgacaagaaacaaatcctttttgttaggtcacttctaacactctgcctccaacaaaataaagaggacctattcaagctgtcagctattatatcatttaaagtaattttgggaaggaggccaggcaggaggatcgcttgaggccaggagttcaagaccagccctgggcaacataatgagaccctgtctctatgaataataataataaaattagtcaggcatagttcgatgtgtcatagtcctagatactctgaaggctgaggcaggaggatcacttgagcccaggagttcgaggttacagtgagctatgatcgcaccactacactccatcttgggtaatggggccagccaaacaccacagaaaaaactgcgactccacccccaccagctaaggtcaaa

SEQ ID NO: 206 - DNA, 1365 bp, Homo sapiens
ggccgcctgctcactagataacgcctacttccaaaagtggcctgcccagactattttggtagcaagcgtggaaatcagatctgagaatctcgggagcagccctggtgcccaattttctccatcacgcacacccttctcgcctctccctgcctcctgcctttccacttgcaccagttttcccaccccagcctcagggcggggctgcctcgtcacttgtctcggggcagatctgccctacacacgttagcgccgcgcgcaaagcagccccgcagcacccaggcgcctcctggcggcgccgcgaaggggcggggctgtcggctgcgcgttgtgcgctgtcccaggttggaaaccagtgccccaggcggcgaggagagcggtgccttgcagggatgctgcgggcgggagcaccaaccggggacttaccccgggcgggagaagtccacaccgggaccaccatcatggcagtggagtttgacgggggcgttgtgatgggttctgattcccgagtgtctgcaggcgaggcggtggtgaaccgagtgtttgacaagctgtccccgctgcacgagcgcatctactgtgcactctctggttcagctgctgatgcccaagccgtggccgacatggccgcctaccagctggagctccatgggatagaactggaggaacctccacttgttttggctgctgcaaatgtggtgagaaatatcagctataaatatcgagaggacttgtctgcacatctcatggtagctggctgggaccaacgtgaaggaggtcaggtatatggaaccctgggaggaatgctgactcgacagccttttgccattggtggctccggcagcacctttatctatggttatgtggatgcagcatataagccaggcatgtctcccgaggagtgcaggcgcttcaccacagacgctattgctctggccatgagccgggatggctcaagcgggggtgtcatctacctggtcactattacagctgccggtgtggaccatcgagtcatcttgggcaatgaactgccaaaattctatgatgagtgaaccttccccagacttctctttcttattttgtaataaactctctagggccaaaacctggtatggtcattgggaaatgagtgctcagggagatggagcttaggggaggtgggtgcttccctcctagatgtcagcatacactctttcttcttttgtcccaggtctaaaacatctttcctagagaaaacaaaagggactaaactagaaatataaagagccctatacatgacaggtgatcacgtactgaatgattttgaagtagtacaaacaataaaaattctcattccgcatcatcatgcggtccatgatgatgaggccg

SEQ ID NO: 207 - protein, 217 aa, Homo sapiens
MLRAGAPTGDLPRAGEVHTGTTIMAVEFDGGVVMGSDSRVSAGEAVVNRVFDKLSPLHERIYCALSGSAADAQAVADMAAYQLELHGIELEEPPLVLAAANVVRNISYKYREDLSAHLMVAGWDQREGGQVYGTLGGMLTRQPFAIGGSGSTFIYGYVDAAYKPGMSPEECRRFTTDAIAMSRDGSSGGVIYLVTITAAGVDHRVILGNELPKFYDE

SEQ ID NO: 208 - DNA, 23458 bp, Mus musculus
cccaagtctacatgtgaactgatcagagggcagggctagctcagagtggatcctcagcctcttagaagatgagtcgaatctacgaatacctgtgggtgcaaggaaagaaacctagggcacgaggggacccctcatgtatgttccttacatgcagagcgctgggtgtggccctggcactaagtctgctgttcatcctcctcctgcgcctggtggcggcacccctggtgctgctgctgattgtcggggtgctcgctgtgctcgcctatggcatctaccactgctggcaacagtaccaagtgtttcgggacaagggcgcctccatcacccaactgggcttcactaccaacttcagtgcctaccagagtgtgaaggagacttggctggctgcttgtgagtcccctgcccagctcctctgtccactggtcccctagggttgggtgaccctggcccttacccgggactgcctgccacctgctgtctccatgcagtgattgtcctggctgtcctggagggcatcttgttgcttatgctcattttcctgcgccagaggatccggatcgccatcgctctgctgaaggaagccagcaggtcagggcctgcctgtgagggggaggggaccttggccaggggtgctggcctgggtggggtaataggaacctaagaggagaaaggtagaaatggccaatgggtaacactgctaaattccagccttgtttatttgtttgtttgtttgtttgtttatgtagtgtgggggaagtgggtgtgttgagacagcctttgtctgtgcagccctggctgcccttggaactcattgtgtagaccagactggcctccagctcatagaaacccatctgcctctgcctcccaagtgctaggattaaaggtgcgtgttaccactatcaagagagttctagcctcttaggccctcagtttccctgtctggtttgtttcattgtccttgggaggaggtgagatttatttatttgtgttctatgtatgggtgtttggccagaatgcatgtctgcgcacacgcctggtccctgtggaggtcaggaggagaggaactggagttacagacagttgtgtgcctccacgtggattctgggaactgagctcaagtcctgtgggagaacagccagtgctcttcttaactgtggagccatctctccagccccaaggggttttgttttgttttgtttttgagacaggaacttatatagcctaaacgaatatcatggagcagctatgtaactgaggctgacctccaactctgggtcttcctgccccacaagatggtgatgatacagggtctcaggaagcacaggctgacctcactgtacagttgaagatgaccttaaacatatccttctacacctacctccagaatgctagggatatgggcatgtaccaccaggcttcttttatgctggggtgggggatctagctcagggtctcctgtgttaggcacaccctcctctgtcatcatacccaactcctgtcactcttgcaacataacccagactggtctcagactggtgacaaccctactttctcagcctctcgggtactggaattgaagtatgttcaccaccctcagactccctatcacagcagtctaaaccttgcaatggcacggtgaggactgcatgcgtgggtgtggactaagcacaggactctggaagcactgggagctgaggtgctcgctgggtcaaggggtgggaattgagataggaggagcagagatttccaaagccaccagggggcacacctttcgggggttctcttcccttacactccctgagtgtcccaggtgtcttctgtgactccagtctcccctatgggtcccttgagccttactcggttcacccagcaagagcctatagtgtatccctcctggaatcaggcgctgggtttattgatatggaagaggaaagctgtagttctgtttgtggtctggaaaacaaacaggcccgaggaagggtccagccatggtcagacctgggagcggatgcacagctctggggtcccagatgactactcttgtcttcatacagggctgtggggcagatgatgtcaactatgttctaccctctggtcaccttcgtcctcctggtcatttgcattggttactgggccgtgacagctctgtatcctttatacagctcccactagagagctctcaggggacagggtgtgggtagggacatgggacaggccccatgaggggatgtgacagaactgtattgcaagagtgagtttgggttgaatgccaaccctctgtgggagtgaacaatctgcatgagtcccaggggcagcatttaggggtgtcctgtagtggacggctggcattgtgcttttcttgactcatctctggatacctggccacatccgggcaaccccagtacatctactgggcgtccaacaccagtacaccgggctgtgagaacgttcctgtgaacatgacttgtgacccgatggtgagagggaatagggtgggtgctgagggggtcttgggggtcagttagcacagattttcgctagtgcacaaatacccgagagggccaggactctcacatgggtgaggcctcccttagttcgatagtctagttacccaatttgtggaaagtgaggtggagactggaaacgcaaagtaaagctggggaggttgaatatcaagtagaacctctctctgcctccaaggccattactagctcctcctccttgtcctgtggctcctcccactgctctataaatcggagctgatcctaatcctgtctcagaggtcctttaggagtttttatggcattaggtacatctagcgctgagcagaatgcccgtccactgatagagagccaagctggctggacttttccttttcattcacgtcctgggaacggagccccagacagtggccctgggaagtccacaggagggcctcctggaggaactgggaggcctgttggtacttcccagcacttgagaggtggaggatcaggcttcaacaccagtctctgtcacgcagctagtttgaggccagcctgagctacgtgacgccatctctaagaagcatagccaaaaaaaaaaaaaaaaaaaaaaaaaaaaaagccgctaatttcagcatcctgaaggttaagagtggtgattttaaattcaaggccaccctgggttacataaggaaactgtacctcaaaaaaccctacatacaaaaaagagaaggaaccactgcctggctttatttcaaacatcctcatacattcagaaaccatgaagcttttaaagtcatattttctgcatttatttagtttttaattgctcattttctgtgtgttgttatggagaattccaaacatatgcagaagtaacggtaggtcttgatttcctgaagccctcagcttcctgtaagaacgttcctcctcctttccctcttcctctttgcaaagttagaatttgagcccaaggcctcaggcatgagctacatccctaaccatccccggggcttaaactttaccttcctgccttcatctgtaactttttttctagagttctggtgaatcctagataaattctccattactgagctacatccccagcttctagaagttaaaaagggttttcttggggctggagagatggctcagcggttaagagcactgactgctcttgtgaaggttctgagttcaaatcccagcaaccacatggtggctcacagccatctgtaatgagatctgacgccctcttcaggtgtgtctgaagacagctacggtgtacttacatataataataaataaatctttaaaagaaaaaaaaaagctttaaaaaaaaggttttcagccgggcggatttctgagttccaggacaacctggtctacagagtgagttccaggacagccagggcgatacagagaaaccctgtcttgaaaaagccaaagggaaaaaaaaaggtttttcttccccacctcttttaaaatttttatatcttttattatttcattatttcatgcactttattattattttattttgtgcatacaggtgtctggcctacatgtatgtctatgcttagcattgtatttgctatctaaagaggccagaagagggcatcatatctcctggaactagagttatagatagtggtgagccatcacgtgggtgctgggaacggacctctggttctcttacaagagcagccagaggcatgccatagctggcttgcttttctttttctttcttcctcttctcctctttctttctttctttctttctttctttctttctttctttccaggctgacctgaaatgtattctgtagcccatactggcttcaaattcatggtgatctctctgcctcagtttccttaagtatcgggatcacaaggatgtcttagttaaggttttactgctgtgaagagacagcatgaccaaggcaactcttacaagaacaacatttaattggggctggcttacaggttcagaggttcagttcattatcatcaaggcaggagcatggcagcatccaggcaggcatggtccaggaagagctgagagttctccatcttcatctgaaggctgctagcagaatactgactcccaggcagctaggatgagagtccatacccacagtgatacaagtactccaacaagaccacaccttctgatagtgtcactccctgggccaggcatattcagaccatcctaagaagtaaagtaccacatagcacataggtagtctaaatacaaactgcaccataccacttaacatgtaaataagggaggtctttttgttttgttttaaagattgtatgtgagtacactgttgctgtcttcagacacaccagaagagggcttcagatcccattaccgatggttgtgagccaccacgtagttgctgggaattgaactcaggacctctggaagagcagtcagtgctcttaaccgctgagccatctcttcagtctaataaggtggatctcagacagcattttcttgcttgcttgtttgtttatctattcatagacagggtctgatgtagcccaggctggcttgaaacttgctgtgtggccaagaatgatcttgaacttctgatcctcctgtctctcccttccatgtgctgtgacgacaggtgtgccccaaagtgcagtttttcaaaagtgacctgtgtacattggtgttgtgactgtgtgtatgtcaatgtgaggttgtcagatgcccggggattggaattacagacctaccatgtgggtgctgggaattgaacctggttcactttggaagaatagccagtgctcttaaccgctgagtcatctctccagtccccactcagggtttgatgtggtggctttgtgcatggtaggcaagtactctatcagctgatatccttccccagcccctcaacagatcgctcagaaagcaggacagtgataaaaagttgtcttttgttcctgaagccccgagttctacactagaaatggggaggaaaggcggctgcaggggtggaggtgggcataaggataatgaaagcagggcatgaggctcaattttgtgtgtgagttttgtaggatgtgtgagatttggtgttcggtcccagcaaagcaaatgcatacacacacataccacacacacacatataacacaaactctcacacacaaacacaaatatgtaccacacactcatacccacacataccacacccacatacatgtaccacacatacatacacacatacaacacactcacacatgtaccacacatagatattcacatacaacacatgcacacatataccacacacatacatgtaccacacacacatacacacacacacatacatgcactgcacacacacacacacattccacagacatgtacacacatacagacaagcacatacatacagatacacacatgcatacacttacacatgcatgcatcacatgcgtgtgcacacacacatcacagacacatgcacacagacacacacacatgcatgctataactgtgtcattgttagagcccacaaagtcagtttaatatcaataaatacccacagtgtgttcagtgcacacaaggcttttccagaagcaggctgctgggaaagtaagagggagagggggtggaaaacatccacgcacgcacctcgcttgccttctggatagcttgtgccagtctggaaaccaggaagctgcttagtcacactacagcagcactgaggtggtctgagtctggaggccactaggaacagagaaggtcaaggatttgcctgcaactccgggcatgaacctgctatgtcctgtcacccccaggccccgttgaattcctcgtgcccaaacctcaagtgcgtcttcaagggctactcgaccacgggcctagctcagcgttctctcttcaacctgcaaatctacggagtcctggggctcttctggactgttaactgggtactggccctgggccagtgtgtccttgccggggccttcgcctctttctactgggcctttcacaagcctcgagacatccctaccttccctttgagctcagccttcatccgcacactccggtaagccaggggcagccgcctagggaagtgttagtcctagagataccaggggtcctggggtgcctcatctcacctaactaactgcctctgcagttaccacactggctcactggcgtttggagccctcatcctgtcccttgtgcagatagcccgggttatcctggagtatatcgaccacaagctaagaggtgagcaggtggtgggctgagcagccagagccttggaagggcaggcagacaggcagaagctggcggctaagcgtgagcttcctttgtccccaggatcccagaaccctgtggcccgctgcatcatctgctgcttcaagtgttgcctctggtgtctggagaagtttattaagttcctcaaccgcaatgcctacatcatggtgagcaaaacctccatccgtccctggctctgtgtccctcagcccgggctccaccatcactcgggcaagctcaccagaggtgtggctcagaccttccctgctcctcacagatcgccatctatggaaagaatttttgtgtctcggccaaaaatgccttcatgctgctcatgaggaatgttctcaggtcagaccgccatgccccagtggggtctcccacccacttctcccatcccaaagctggtctcagaaatgtcctgtgcttggtccagtaccatgccatcacctgccagcaccctcaccccagtctgtcctgacttctatgtagggtcgtcgtcctggataaagtcactgatctgctgctgttctttgggaagctgctggtggttggaggtgtcggtaagggtcaagaccagggtttacggggtcaggtgccccctggggtgcacgaagggggggtcctcagaagaacagcactgaccgcaggactctttcccacaggcgttctgtccttcttctttttctccggtcgtatcaaggggctggggaaagactttgagaaccccaacctcaactattattggctgcccatcatggtgagtgacacctctctctgccccacccacatccccagaggagcctagggctcccaatcagtcttgtctcttgcagacctccatcatgggagcctacgtcattgccagtggcttcttcagcgtctttggaatgtgtgtagatacgctcttcctctgcttccgtgagtgcccccctcccccaaccctccacccaccctcaagctcttaggcctccaggcttcttttagagactggttgcttgtagctttgtgagctaaaggagccagagggaatgtcttcagacattctaaggctagaggtttaggaaggaaagaagggaatacaccctgggcattctcagacaggggaaacttctcagacggaggcctgagtttaacacttcctaggaggtagtcagagtgtgtggtttttacttaggtttttttttttgggggggggggtcatgcataggggtgagacaggaacagactatagtacagactgacccggaactaagtctatagctaaggctgactcaaagtcatgatcttcctacctcagcccccaagtgctggaattcttgtgttttttgacctggtgacaatggtgaccatgatatagaagccagagccttgggcctgagaagcaggaatggccctacctcggtagcagtcccccagccatgcactaagcagtggacatgaatattttattgttttatgggttttgcttgttgcttcaattttatttatttacatcaggcctctctatgtattcttggctagctcctactatatagactaggctagatctaactcaaaccaatctcctggcctttgcctcccaagcaatagaatcatggatatgcgcaaccattctcaagacagagttgtgctgtggagacctcaggggcctttgtagtctaagtcctcccatgtccacattctaaatgtcgggattacagagaaagccaccatgatggtctggcatgtgatttttttttttttttgtcttgttatcaccctatgacatatacagttatttatcccactttgtgtgagaaaaacaggttatacagcctggtctacagccagccagggaagttgtatcaaactgcctgaagtggcccggacaggaaaccaggatgtttggtttatacaccccagattattttggggtacagtggggtgccattatcaggatccaccctgacggatctactttgcctctcagtcgaggacctggagagaaatgatggttcccaggagcggccttactacatgcccaaggcactcctgaagattctgggcaagaagaatgaggcacctacagggggaaagaccaggaagaagtgagagactcatcgtgacctggaaatgcagccctcctgtacagaagccctgccgtcaatgccttgagaatcacgattttgtagaaaacagattttattaaagactaatattttatattcttgataagtttatggctttattttcagtgaaaacttgcttcctttttttttttttttaattaaaatccaaattgctatcacacgattcaatacccagtaagaaaaacttgttcggtgactgaggccaggagactggggtgtaactcagctggtagagtttgcctagcatggaagggtccccggattctgtctatagcataagcagggctgggacacatgcctgtaatcggtacttgggaggtacaggcaggagcactggaatttccaagttatctgtgtctgtttagagacagaatttttctgtgtagccctggctatcctagaactcactctgtagaccaggctggcttagaactcaggaaggagggtggctcttttttcattcattcgtcgctttttttttttttttttttttttagcttttcaagacagggtttctctgtgtagcccaggctggcctcgaactcagaaatttgcctgcctctacctctgcctcccaagtgctgggattaaaggcgtgcgccaccacgcccagctgcttattatttttaacctagtgattctaatcagtgttagtcatgtgcttaagggcattggggtcatccactgggacgtggggtaccatgggcacactcctaaagaaaagtgcctttctctcccctagcagccatcaactgccaagatctcctcagctaggagtggggcttcccaaccctagggactcatacaaactaggaaggtactctaccaactgagtcatatgccatccctaacctgtctcttccacaaggggtcagtgcctttcatagccgccggttgctttaaaacacgccccgcccctttcgtcacgttctggcgttagagccagtcaaaaggctcacacagactggggccgcctctgggtcacatgctgatggactaattggagtcgcggcagcgcgggctgcggcccccaaggggaggggtcggagtgacgtgcgcgcttttaaagggccgaggtcagctgacggcttgccaccggtgaccagttcctggacagggatcgccgggagctatggtgggggcagacccgaccagaccccggggaccgctgagctattgggcgggccgtcggggtcaggggctcgcagcgatcttcctgctcctggtgtccgcggcggaatccgaggccagggcagaggatgacttcagcctggtgagccttgctgcacctgcagaggtggccactgcccagctcggccatccctccgcgtgacactcctgcccctccatcccctcccaacacctttgcttccttgggcccctggctcaactgttatggggtcctgcccctcatccctgaaggttccttctcccctcgcagcctctccttgctcaggagcctccaggttcggcccatactatcctctgggctcccacctcttgttctaggacacccttcacccctactcaggctccccattaccctctctcatgggaaccctggctggagccagtacctatcggtcttaggtaccttaaacctcgtgaagcttgtctgcattgaggtgtccttctgcgcaggtgcagccgctggtgaccatggagcagctgctgtgggtgagcgggaagcagatcggctctgtagacactttccgcatcccgctcatcacagccacccctcggggcacgctcctggccttcgctgaggccaggaaaaaatctgcatccgatgagggggccaagttcatcgccatgaggaggtccacggaccagggtaacaaaggctcccgggtggaaagagcgggtgctgggttgtatgggtgatcggggtagggagttgggggttcccttcatcaatggagcagagccgagcagaccccggggaccactgagctgctgggctggttggggtcaggggctcacagcgatcttcctgctcctggcatccgaggccagggcagaggatgacttcagcccagagatagaactttggggcttgagtccctaatgagttagggaaaccagaggatgaattttgtccatagtttctgtaactaagaaccaaggtactgaaaatgagaattatgtctcaggggaattagcaggaaataatgtcagagaaagaagaaacatggttctggtgccacattgaggtccccggggagaggcaggaagtaaacaacaacccgtacaattttctctctgctcttttttttttcttcttcttctaggtagcacgtggtcctctacagccttcatcgtagacgatggggaggcctccgatggcctgaacctgggcgctgtggtgaacgatgtagacacagggatagtgttccttatctataccctctgtgctcacaaggtcaactgccaggtggcctctaccatgttggtttggagtaaggacgacggcatttcctggagcccaccccggaatctctctgtggatattggcacagagatgtttgcccctggacctggctcaggcattcaggtttcaccctgtggataggaggagggcaagatcccatgaatcagattttttttcctgagtgggggcaccttagaaggatggcgttctggaagtttccatctcgattgtggagatggaactaccattgacgtctcacatggagactgtcaacagatctgtccttagcctgtgcagggaagaattgggtgccattgggcagacacgtacctatatcacaatgcccggtgcccagcagggtccatgagctcaggttagagagacgttcccaaggctgggtggacacctgcacttgtccagtggtgcattccacatgcatgtcctaagggacttccaggaaagggcagtggagagggtgtaagaaccaagcatgatctgtttatatgtttggacatgccatggtgaagcccatttctttgtatgctagccaaaaatttatttgagaacaaaaaaactaaggcaagaaaatcactgtgagttaaaggctagcctgggctacattgtaagttcaaagacaggctacctagagagataatctcaaaatggggaggaggactgaaaagatagtattgaaattggggacatttgcagccctcaggaggccagggcaggcagatctctgagttcaaggctagcctagtctacagagagcattcaggctactcacaagtaaccctgtgtagcatgcctacagttccagcatcaggcaatagaatgaggaggactgggagccaaatagtcagccttggctacatagagcattggaggccattgttattcaaataaatatttcgaatttagagagagatttttttcttttctattttttaagatttttgaggagtgtcattcaatgagggccttgtgcacaggcagcaagaactctaccaccaagctgagctatacctcagcctttttatatacttttaattttgagacagagtctcactatgtccccaggttagccttgaagtgactctgtagcccaggcaaaccatcttctgtgctcagcctcctgagtagctgggattacaggcctgccatgaaaaagcttcttaatttgggcagtgtctgtgggagaacaaaagggttccagtgtgtcgcactgggagctgccagcgctctgcctgagctccatggcagcacctttgcgacacccacttcctcttcttaacagaaacagcgggagcctgggaagggccggctcattgtgtgtggacacgggacgctggagcgagatggggtcttctgtctcctcagtgatgaccacggtgcctcctggcactacggcactggagtgagcggcattccctttggccagcccaaacacgatcacgatttcaaccccgacgagtgccaggtcaggagtccatggactgtacccgcccacaccaccgccttccccagctctggcttcctcagcctccccagcttctcctgttctctcccccacgcagccctacgagcttccagatggctcggtcatcatcaacgcccggaaccagaataactaccattgccgctgcaggatcgtcctccgcagctatgacgcctgtgacaccctcaggccccgggatgtgaccttcgaccctgagctcgtggaccctgtggtagctgcaggagcactagccaccagctccggcattgtcttcttctccaatccagcccaccctgagttccgtgagtgcctgagggtggagtgggggttggggggcgccccgtctgaacaagtcctggacagagcagagaccctcctccctctgactattgctctcctaggagtgaacctgaccctgcgctggagtttcagcaatggtacatcctggcagaaggagagggtccaggtgtggccgggacccagcggctactcgtccctgacagccctggaaaacagcacggatggaaagaagcagcccccgcagctgttcgttctgtacgagaaaggcctgaaccggtacaccgagagcatctccatggtcaaaatcagcgtctacggcacgctctgagccccgtgcccaaaggacaccaagtcctggtcgctgacttcacagctctctggaccatctgcagagggtgcctgaaacacagctcttcctctgaactctgaccttttgcaacttctcatcaacagggaagtctcttcgttatgacttaacacccagcttcctctcggggcaggaagtccctccgtcaccaagagcacttttttccagtatgctggggatggcccctgtccattctcttccaggacaacggagctgtgcctttctgggacaggatgggggaggggctccccctggagagatgaacagatacgaactcagggaactgagaaggcccggtgtcctagggtacaaaggcaggtactagatgtgattgctgaaagtccccagggcagagtgtcctttcagagcaaggataagcacacctacgtgtgcacctttgattatttatgaatcgaaatatttgtaacttaaaatttttgatgcagaaaaagcgtttgtggagtctgtggttctgtctgctcacgccttcccaattgcctcctggagagacaggaaggcagctggaagaggagccgatgtacttactgggaagcagaaacccctagattccatcctggctgctgctgtttgcaagtgtcaaagatgggggggcgtgtttatattttatatttctaagatggggtggcataggaaatagggaacagatgtgtaaaaccagatgggaaggacagtctgtgagaaaggagcaagcagttgctgcaggtgtgggagagcaaagcccttctccacgtggaaagagcccagatggacgctaagcatgttgggcacctgtaaccccgcactcgctggactgacggtgtagctcagtggtggagctagtacttggaacgcctaagactctgggttcagtccttgggggggggggtatgtgtttattgagaggaaggtgtacgtactgtaggtcagaggacagcttactggagttgtctctctccttcacgctgtgagtcctgtggaatgacctcaggtgtcagagttgggggcaggtgcctttgccagctgagccatcttgctgtctctgctttaatttaaaaaaaaaaaaaaaaaagaatattaaggtctgagggattcgggctgcgttcatttcaattagagggtcatatttcttttgacatttcttctctaagaaatgttaagatcatttgttctgtgtgatagaggtatagctccattgtatgtcagcagtgagggatcctgtgcattttatccagagtttgtacggtgttctaggggctgctagtgcagcccagtgctaaacacttcagcatgcacaaggcctcaatcagtgcatgcatgtgcacacacacacagacacacacgtacacactgacacaggtacacaaatacacactggcccacatgtacacatcgactcacaggtacacagacccactttgacacacatatacacagacacaaacgcactggcacacacatatacacaggcacacatggatagatggacacacgtgtacacatacacacacacacagaaatacaaatgttcaggttttctaaaaaaaaaaaaattagagacgtgttgacttcatttttagcaaaaatcctgtcatgtatcttaaagtggattgaacccactatgtagcccaggctggcctccaaatgggcatccttctgcctcagtctcccgagggctaggataacaggagtatgccatcacacctggctaatagaaattttcaaaattgtttgtttgaaggtgactcttactatattgcctaactgatctccagttcgtgaaatcctcctgcctcagaaccaggactgtcaatataacccaccaagacaggccaacattcacaattgattgttagtttgtggtctgaatcaaggtcttatactgtagcccaggctagcccggaatacacgatatctccagtgcttcagatcctcagttctaactaagcatggccacatccatgtttaactgcaaatttgatgttaccatggtttggtttggtttggtttggtttggtttggtttggtttggttttttggccattttttttttctcatgctgaggccttgtgctctcaagttggggagacagcatggagggtagctgcaactgtaaccccagttccaggggacctgacaccctctggcctccacaagtattaggcacatctgtggtgcacagacatacaatcaggcaaaatattcatacacataaaataaaataatttaaaacaaaagcaaaaatcaggacctaagaaaaaaatctattcctgattcttttatgttttgtttgtattttatcaagacagggttgtttctctgtatagccctggctgtcttggaattcactctgtagaccaggctggcctcaaactcagaaatcctcctgcctttgccttccaagtgctggaattaaaggcatgcgccaccacgctggctttgattgctgattttgccactcttttaatctgtcgcagcctaacctttctgtttgttcagtaggttgcttgatttttgtgccatccagacaaaacagcaggttgtcccgtgggatggcccttgaaggagtcacctaacatctccctccacctctgaaggtttggctgcattcagacacctctttgggagaataggggtgcctcatgttttccatgtgctgcccactgctcccccacgctcgcacagcctgccctccttccgtgtagagactgagcacagggctgaggtggtacagcaatctttgtaaggtttgctggtaaccctcccaaagcagcaatcccatcctgcatgcgttgtctgctaccatatttcatggagttgcaaatgagtggtttttacttttatttcttcctgaaataatttataacctgaaatccttcagttcaaagaaacacacacacacacacacacacacacacacacacacagagagagagagagagagagagatgcaaagaatctggatttgactcctagcacccacaaccatgtgtgactttaggacttcagttccagaggatctgatatcctcttctgacctctgtgggcaccaggcacatacatatatacatacatacatacacgcaggtaaaacatttatacacataaaactaaagtaaatctaaagcaaaaatgaagacttcaagaaaaagagagagagccttctctcctctgggctgtctgttagctggtgcacggtctgtacaggaaccacagcctgtgtgggctcgctctcccttaattgagcagttctgagtcagttgatgtaactcattgccctagtcagtaaaccacagtgttgcccaatgggatacatagaaaggcccttccctggcctgcagaggcagacagagggagtgagggaagatgcttgacagtaagacacctagcaggctgatgggttagctcagtacagtgcttgcttagcatgcgtgaggctcaggtacaatgtccagtccctgggctggtggtaattcatgcagatcactaaacagatcactgaacgaggaagaatggaggtcatgaccacagcaattgggacaccagtcccatgactatcgccacccaaaattgcatacctacctgccagtcttttgctttttatatgttgacccaggcctcgttccatagcctgggactcatgcaatcttcctgctcagcttcttgagctgagatcacaggcccagccccaatagtagaattggtgatagcaagattggcccagtggttacttgctatcaaggctgatgacctgagttcaaagctctgagcccacagggtggaaggagaaaactggctctagcaaggtgttctatgaccaccaaacatgccacagcatacctgcacccaccacccctacaaaacaaataaacaaataaatgtgaaactaaacaaaaagaggtagtggaagagagtgagactaggttgtgcctgcctgaaaccccagctcgcagaagatggcagaggcaggaagatcatgaaaacttgaagccagccttgtgtctgtagcaagttccaggctagtcagagctacacagcaataccctgttaatagaaagacagacagtggggctggagagatggcttggaggttaagagcactgactgctcttccaaaggtcctgagttcaaatcccagcaaccacatggtggttcacaaccacctgtaatgagatctgatgtcctcttctggtgcatctgaagacagctacagtgtacttacatataataactaaataaatctttaaaaaaaaattaaaaaaaaaaagaaagacagaatggtcaaaattaaaacacacactcacacatgcatgcatgcaagcatgtacacactcatatgtgtacttacatacactcatgcaggctcactgtacactcaggaggcatgcacacacacacacatagtggagattggaaacgatactcaccgtgcctgcctgtgagcctagtgaagcagaagcagcaggcagccacagagaatgacccatcatcacctgccttcttcaggccaacaaccctgatttccagtacatggtgcttaaagacctcctccttcctgggacaggctctggagcccatggtaaactagaccccttcatcatcacactagaagttcaggagatctagccttggggcccagagtttgcctcctcccactcctcccaccagtgctaggaatggagtctggggtctcactcaggcatgctgtgcaagtgctgaaccactgagccacatacctatccctgggtgcttttattctattttggttaggggacagtgtcacctactgggttactggctatgccacatccaggggataatgtgtatcatggacagatggttccgcagtccatcttaagagcacttgttcttgcagagcaccagcgagtgtggttcctggcatcttcttggtggttcacaactggctgtaactccagttccaggagctctaatgccctcttctgaccccttcaggcacacatgtgtggcacacatgtcagcaagccagtcacatgaatgaataagtaaatctaaaaacattttgaatacatttctgagctgagatggtgtctctgtaagtaaagtgcttatcatacaagcctgaaaacctgaattctgctccagcactcatgtaaaagccagtcatgacgagctggaaaatggtggcacacgcctttaatcccagcacttgggaggtagcacaaagcagatttctgagttcgaggccagcctgttctacagagtgagttccaggacagccagggctgcacagagaaaccctgtgtcttagtcagggtttctattcctgcaccaaacatcatgaccaagatgcaagttgggaggaaagggtttattcagcttccacttccacattgctgttcatcaccacaagaagtcaggactggaactcaagcaggtcaggaagcaggagctgatgcagaggccatggagggatgtttcttactgacttgcttagcttgctttcttatagaactcaagactaccagcccagagatggtaccatccacaaggggcctcccccattgatcactaatcgagaaaatgccttacagctagatctcatggaggcatttcctcaactgaagctcctttctctataactccagcctgtgtcaggttgacacaaaaccaaccagtatgccctgtatagtcaaaaaaccaaaaccaaacaaaaccaaaacagaacaaagacaccaggcctgtcatgagagcaacacataggtactgggaactaaattctggtcctgtggaagagcagccagtgcctataaacctccagccccaagatggtgttttaatgcaatggtttcaaagggcctagagagatgactcagtggttaagagcacttgttactgttgtgatcataaaaagagaaagcgctataagaatatgttctggcacggtgtgggggaaggggatgcgtctgtgggcctatgacaaggcatcccttccccctgagggaccagacacacaccggtatagtatagaatagagtttatttagggcatggagaggggagttaagagggtagcagagaggagaagtaggggccggccatggcctggtggagagaaggaggaagggaatggggagcaagaggtaagagagagagaggaggggccaagcagcctcttttatagggccatgcctacctggctgttgccaggtaactgtggggctggaatttagacagaattccaacagttaatttgccagaggacttgggttttggtttccagcacccacatgatgtccctcaactatctgcaactccagttttagaggaaccaactccatcttctggtctctatgggcaccaggcactcaggtggtacatttagatacaagcagacaaaacattcatagactcaacagagtttaaaaaacaagaagtaaaaacaaaacaaacaaacaaaaaaaaacccaaaacaaacaaacaaacaaaaaaaaaaccccacaagcacctgtgctgggtaaacatcttgtttttttttttttttttttttatttccttgtctttgatttcctgggaaaggaagcagaggccacaggcatgctagttaattgctgcaccactgatcactgggtaagctgctctttatctcggttctgggtgtaacggaaaaggctaactatctaaaaattcacacttgtatgagttggaggctagaagtctcatttcctgtgaccccgaatctttaagcaaagagcctagcggtgtgacagagcttcagacttagtttgaaatctgttggatcagagcccataaaagttacggagtagcagtatggcctccagcaagccggcaggatgatgctccctggagaatctaagctgccccagcaatcggaggcagggtggaaagcgccacagcgagcagcaggaactgtccaagcatgggtctctgaggatgtggtcccaaggttagcaccgtccccctccactgctgaatcaagagcgggaggccagcacttcagcccacctgggtttcagcaaggcatttgtccaataagattaggagaaatgtcctgggccatgtactggggcgggggcggagtgggagagcgagcgagggcaggagtggaggagggggatggggggagaggcaggtcaatggaggctgtgtgaatggctcagtagtgagcagtataaatgggagaggtttggtctcgaattctccagagagggagtaaaattaagcaagtgctgtcttcattttgatttgagataagttgtttacatttcctcattctctctttctttctttctttcctcctttcttcttgggaaagagtttagataagctctaaacctaaatattaacctcaggggctggagagatggctcagaagttaaaagcactggctgctcttccagaggtcctgaattcaaatcccagcaaccacatggtggctcacaacgatccgtaatgagatctgacaccttcttttggtgtgtctgaagacagttacagtatacttacatataaatcatatatttatcatatatatatatatatatatgtatatatatatatatatatatatatgaaatcatatatataccatatatgtatctcaaaactgaaattccctatatagcagaggctggccttaaactcctgatctgatcctttttttttgggggggggggtattgagacagggtttctctatgtagccctggctgtcctagaactcactttgtaaaccaagctggcctcgaactcagaaatccgcctgcctctgcctcccgagtgctgggattaaaggcgtgctccaccacacccagcctgatctgatcttcctacctacagggaataccccacccccacccgaacagtgttctgaagattagctagggcccacactatatcactgagctatatacctcaagtccctttgtatatatttttgagacagggtgtaggtaagtttcccaagctttgaccacactatgtagcccaggctagccttttgtttgcaatacccacaggcctcttagatagctgggcatagttccatgccttcaggcctggctcttcatactatttactgttcatcatcatcatcataaaaaaaaaaaaaaggctaggcaggggcatatggtcaggtggcacacctatgctcaaggccctggattattcaacctcagcacgcaaaaaatgtttcgagtcttctttttatagttgttcagtcctctcagaaaaaaaaaatcaagccagctgagcgagggttctctgagtggtcctgatggaaaatgcccacccgacccagcatccaccgtcacaaggccctttggagctccctcaccactgtgcttgcccctgaagtttaactggggagtgctggcaaacatctccatctcaggcatatttttagattttaatggtttaatgatgggcaataggcattccagaataggcatttccacttgagggtcacctgaccagggacaatgacatctaacattttcagagtcagcatgtactttggactaactggcaataatctgtttccttgttctttgggaaattaacaacaatcaaaagacagccctgtgggagacagccggacaccagcaccagctacctaagacctttcctcaaaacggaaaagcacaacaatagttaaagataactatggggggctccagagatggctcactggttaagagcactgattgctctcccagaggccctgagtcagttcccaacaaccacatggtgggtggctcacagccatctgtaataggatctgatcccctcttctggtgtgtctgaagacagctacagtttggtcatagaaataaataaatttaaagaaaagataattacaggtctggcctgcttagagacactgtccacctccttgggcagagctaaggaccctgcctgtgcctgttggggtggcagcattgtgataaacctgcatggccagaaaagctcccaacaaactgtggctggcacaactgcagaacttgacacttctcttaatgtttttaaggataatttcctttccaagtcattaatgtggcattcagtcaggcttccagttaatctcttcattatgcactttttaaatataatatttccatttattctctgagaattccatacatgcatacaatatagtttgattctatctacatcctgatccaactcagcccagatccccacatgtgcctgcctcccgcttctcctttttttttttttttttttttttttttggttttttgagacagggtttctctgtgtagccctggctgtcctggaactcactctgtagacgtcaaatcctcaaactcagaaatccgctgcctctgcctccagagtgctgggattaaaggtgtgtaccaccactgcccggcttgggcagcacctttttaagagcaacaccttttgggtaggtaaaatggctcagctagtaaaggcatttgcctccacacctgagactttagttcaatccctaagaccctcatggtgggagaagagatctgattgctaatttgtcctctgacttacacaagtgcccatatgaacacacacacacatttgtaggctgattctctataccctaccagccttctgttaccaatagctcctcagctaggtgtggagtcttgtgagtcacttccctgtgtacttatttatattctggaatttctagtcacatttttattcctcccaacccccactgctgggaattgagcccaagacctcccatataagccacacccctgtctcctgatagcaattttaaaagtcattttattttttagattgtgtgtgtgtgtggtatgtgcaatgggtgtgtgcaggtgaattcaggtgtccatggtggccagagacatcagatcatcctttaagaaaaggtcttttataacacagggtggcatagaacttcccatatagcccaggctagcctcgaataaagacaatcct

SEQ ID NO: 209 - DNA, 1263 bp, Mus musculus
tgaccagttcctggacagggatcgccgggagctatggtgggggcagacccgaccagaccccggggaccgctgagctattgggcgggccgtcggggtcaggggctcgcagcgatcttcctgctcctggtgtccgcggcggaatccgaggccagggcagaggatgacttcagcctggtgcagccgctggtgaccatggagcagctgctgtgggtgagcgggaagcagatcggctctgtagacactttccgcatcccgctcatcacagccacccctcggggcacgctcctggccttcgctgaggccaggaaaaaatctgcatccgatgagggggccaagttcatcgccatgaggaggtccacggaccagggtagcacgtggtcctctacagccttcatcgtagacgatggggaggcctccgatggcctgaacctgggcgctgtggtgaacgatgtagacacagggatagtgttccttatctataccctctgtgctcacaaggtcaactgccaggtggcctctaccatgttggtttggagtaaggacgacggcatttcctggagcccaccccggaatctctctgtggatattggcacagagatgtttgcccctggacctggctcaggcattcagaaacagcgggagcctgggaagggccggctcattgtgtgtggacacgggacgctggagcgagatggggtcttctgtctcctcagtgatgaccacggtgcctcctggcactacggcactggagtgagcggcattccctttggccagcccaaacacgatcacgatttcaaccccgacgagtgccagccctacgagcttccagatggctcggtcatcatcaacgcccggaaccagaataactaccattgccgctgcaggatcgtcctccgcagctatgacgcctgtgacaccctcaggccccgggatgtgaccttcgaccctgagctcgtggaccctgtggtagctgcaggagcactagccaccagctccggcattgtcttcttctccaatccagcccaccctgagttccgagtgaacctgaccctgcgctggagtttcagcaatggtacatcctggcagaaggagagggtccaggtgtggccgggacccagcggctactcgtccctgacagccctggaaaacagcacggatggaaagaagcagcccccgcagctgttcgttctgtacgagaaaggcctgaaccggtacaccgagagcatctccatggtcaaaatcagcgtctacggcacgctctga

SEQ ID NO: 210 - protein, 411 aa, Mus musculus
PVPGQGSPGAMVGADPWRGPLSYWAGRRGQGLAAIFLLLVSAAESEARAEDDFSLVQPLVTMEQLLWVSGKQIGSVDTFRIPLITATPRGTLLAFAEARKKSASDEGAKFIAMRRSTDQGSTWSSTAFIVDDGEASDQLGAVVNDVDTGIVFLIYTLCAHKVNCQVASTMLVWSKDDGISWSPPRNLSVDIGTEMFAPGPGSGIQKQREPGKGRLIVCGHGTLERDGVFCLLSDDHGASWHYGTGVSGIPFGQPKHDHDFNPDECQPYELPDGSVIINARNQNNYHCRCRIVLRSYDACDTLRPRDVTFDPELVDPVVAAGATSSGIVFFSNPAHPEFRVNLTLRWSFSNGTSWQKERVQVWPGPSGYSSLTALENSTDGKKQPPQLFVLYEKQRYTESISMVKISVYGTL

SEQ ID NO: 211 - DNA, 23877 bp, Homo sapiens
tgggcacctaaaatcccagctactcgggaggctgaagcaggagaattgcttgagcccagaggcggagtttacggtgagccgagatggtgccactgcactccagcctgggcaacagtgagactccatctcaaaaaaaaaaaattagacaatttatagcataagatgagatatccagttaccaatttaagtacagtaaggagtatctcaagtgaatacttcaaagtcaagtagatctgaatataaattctagcactttccagccctatggtcttgacccaactatgcaacctctctgaaccttgtttcctcatctttagaatgtaaatgacagtgaggtgcagtggctcacgcctgtagtcccaactgctcaggaggctaaggcgggagggtcacttgagtcctggagttggaggttacagtgagctatgattgtgccactgcactccagcctgggcaatagagtgagaaaccctgcctctaaaaaataaataagctaggtgaggtgactcacacctgtaatcccaacactttggggggctgaggtgggaggattgcttgagcccaggagtttgaggccagcctgggcaacacagcaaaaccccatctgtacaaaaaatttaaaaattagccaagtgtggtggtgcacatctatagtcccagttgcttgggaggctaagtggggaggatcgcttgagcccagaagttcaatgttgcagtaagctatgatcatgcagctgcactctagcctgggtgacagagcaagaccttgactcaaaaataagtaaataaataaataaatagataaataaatgacaaagcaaggctgcctggcaaagttgttgcaaggatggcagtaagtggctctgtaggcacataacagttgccaaaggaggtggggataaggtcagaaggcttcctggaggaggtgagatggagctggatttgaacagggagtcatggatgggatttctggtggaaagagagccctgagagagaggcacagtaagagcaaaggtacagattagaagggaacatgggctggatttggacaggagagcctggaagcctggccagggagtgtggatgctgtctctggggcagagcctctggagatgtctgagtcacaaagggacccagaaccctggagtgatgaagtccaggcagtgccacggtctccctggcactccactcgggtggagggtggatggaagggtgacagggtgttctaagagttgaggccagcggagaggagggtccaaaccaaggcacgacagggaggggaggcaggggatagactgggctccacaggacagaagcccatttgtgaaatcaaaagcagcccactgagggatgcaaggcccatcacccttccctcccctaagggcactgtggactgggagggggccagagaccctccaggcagagctcctggcccccaacccagcagcccggctctcccttccagctctgggacgctgctttccatggaccaacattactccaccggcgctcccagggatcaccaatgacaccaccatacagcaggggatcaggtaggcacctccctcccccacatcctggccacaccccttccacccacagccccatctgactctgtctccccaacagcggtcttattgacagcctcaatgcccgagacatcagtgttaagatctttgaagattttgcccagtcctggtattggattcttgtgtgagtcaccagattcccctcctcttgtgtccttgccttcttcctccctgatcctctaccccctcgcccaatgtctgaaacacaggctttggacagaggaggaggagccagagctccgaatggattccaagaccaacaggatttataagggaaagaggcctaatctggggacattgggtggtgtgtggaaaggcagggagggcctctgtaaggggaaagatttgaggggctagggctgaacctcactgtcctcaccctgcctacagtgccctgggggtggctctggtcttgagcctactgtttatcttgcttctgcgcctggtggctgggcccctggtgctggtgctgatcctgggagtgctgggcgtgctggcatatggcatctactactgctgggaggagtaccgagtgctgcgggacaagggcgcctccatctcccagctgggtttcaccaccaacctcagtgcctaccagagcgtgcaggagacctggctggccgcccgtgagtgtcctgcccacccccaagccaccagctgcccaaggactgccctgggccatgcccggccccagccctggccctgacctaggtctgtctgccccatcctctgcagtgatcgtgttggcggtgcttgaagccatcctgctgctggtgctcatcttcctgcggcagcggattcgtattgccatcgccctcctgaaggaggccagcaagttagggcctgcctgggagggagatggggttgaggacagcgtggacccaggagtgctaggggacctagggggtgctagagaggtggcagggagcctcagaggagaagggaggaatatagcacagtggtgaacactgctgtggctttgcttccccatctgtaaaatgggggtaacaataattcctgccttctagggttgtcttgaggattcaatgagtgcctggaatatgacataggccttctagaggggttggtgggagtggtggtggctgagtggaacggcaggaatccgggccaggaggggcagcagcttgctcccgatcaggaactgccacacacacctgccaagggatcacgcttgggggtgatcttcccttactccacccgaagctgccccaggtggcttctctgtgaccctagtttcctctaagggtcctgtgagcctgatttattcagttctgtttatccagtgagcacctacagtatgcctagccctgcaccaggccctgaggacacagatatgaaagacaatgtcactaaccctgttggtcccaccctgggggagtggggcaggccccagtgagggcagcggggtcagcccccccctttttttttttgagacggagtctcgctctgtcgcccaggctggagtgcagtggtgcgatgtcagctcactgcaaactccgcctcccgggttcacgccattctcctgcctcagcctccggagtagctggcactacaggcgcccgccaccatgcccggctaattttttgtatttttagtagagatggggtttcaccgtgttagccagcatggtctcgatctcctgacctcgtgatccgcccgcctcagcctcccaaagtgctgggattacaggcgtgagccaccgcgcccggccggggtcagccccttgagaagatggacagctggggcggtgccggttaacagctttgtctccctgcagggctgtgggacagatgatgtctaccatgttctacccactggtcacctttgtcctcctcctcatctgcattgcctactgggccatgactgctctgtatcctctgcccacgcagccagccactcttggagtcctgggggttgatggaaaacaaagcaatacttgccttgtagagtgccttggtgtcactggaagaggtgcccctttctctgggcagacacaccagcactgtgcctgaacagagttgaaagggtgcacacaggctgaatttcagccctctctgtgcagcaaacgatctgcacaagcacctaggaacaggtccctaaggagcgagtgacctgtggagacctcgtgtgatcatgctttccttgactcccctctgggtacctggctacatcggggcaaccccagtatgtgctctgggcatccaacatcagctcccccggctgtgagaaagtgccaataaatacatcatgcaaccccacggtaagaggaagcaggggacatggaggcgggactagtaggggtgaggggctgtaggggccacattcctcattgtgcagagaagactgaggccacagagggcaagacacttgtgcaaggtcacacactcaacccccagcagagctagaagaaaccagttcccagaatacctggtactcctgttgagccatccatcatgtggggagggaaactgaggctgggagagacagccctggataccaggacttactccacccctccccaggacattgctctgacttgaggaccatcaaccacttcaccctctgagtctcagcctactcctgtttgtttgtttgtttgtttgtttgtttgttttgagacagggtcttgctctgttgcccaggctggagtgcagcagtgcaatctcagctcactgcaacctccatcccccaggctcaagcaatcttcccacctcagcctcctgagcagctggaactactagcgtatgacaccacgccaggctaattttaagctttttgtagaggcaaggtcttgctgtgttacccgggctggtcttgaactcctggggttgccccgatgtagtcaggtacccaagcaatcctctggcttaacctcccaaagtactgggattataggagtgagccaccacatgcagctccattcctctgtaaaatgaggataattataatacccatccctggggtggctgagaagatgaaatgactttgggcacataaagtgcttagtacaatgcctggcacctgataagagctcaacaacaggttgaattgtattatattgttaagtcttactcccttggaacacagagccctaggtagtagccaggtgggactccctgcgggggacccgagagagaagctgcttccaaaattcccctgtgaggttccccgggagtggcgctgggctgctgggaatttactcttctcaaacctgtcatatcttcacctcgtctgagctgggaacatgagctgtgctgcaggcattagccccacccctattaaaaaggggaggtttggcaggcgcggtggctcatgcctgtaatcccagcacttaggaggccgaggtgggcagatcacctgaggtcaggagtttgagaccagcctggccaacatgacaaaaacctgtctccactaaaagtacaaaaattagccaggcatggtagcaggtgcctgtaatcccagctactcaggaggctgaggcaggagaattgcttgaactcgggaggcggaggttgcagtgagctgagatcgcgccattgcactgcagcctgggcggcgagactccgtctcaaaaaaaaaaaaaaaaaggtttatttacatgtacagaggacccactatgtgccaggcactgggtatacaaagcccaaaatgatgtggttctttttctttttcttttttttttcttttttaatgaaaaaaaggctgttacacaggctggagtgcagtgatgcgatcatggctcactgaagccttgatctcccaggctcaagtgatcttctcacctcagtctcccaagtagctgggactacaaacaagtgccaccatgcccggctaatttttttttttaagagatggcgtttcactatgttgcccaggctggtctcaaacaaatgggctcaagcaatttgcctgcttcagcctccaaaagtgttgggattatacacatgagcaactgtgctgggtatgacgtgagtgttgttttcaacttgcttgtgatctagcagtaaagactgacagaaggccgcgcgcagtggctcacacctgtaatcccagcactttgggaggccgaggcaggtgaatcatgaggtccagagttcgagaccaacctggccaatatggtgacagagtgagactccatctcaaaaaaaaaaaaaagattttttgattagccaggcatggtggcacacacctgcagtcccagctacttgggaggttgaagcaggaggattgcttgaacacgggaggcagaggttgcagtgagctgagattgagccactgtactccagcctgggcaacagagcgagaccctgtgtcaaaaaaaaatttttttggttatatttgctagaaagggttgctttttaatttgtgactttttactttttattatgggaatttttaaacatatgcaaaagtagagatgatagcacagtgagttccctgtacccagattccacaaccctcaactttttgctattcttatttcatctatatcctcacctataattttttttttttttgagatggagttttgctcttgtctcccaggctggagtgcagtggcgcgatctcggcccactgcaacctctgcctcctgggttcaagcaattatcctgcctcagcctcctgaatagctgggataataggcgtctgccaccacgcccggctaattttttgtattttcagtagagatgggatttcaccatgttggccaagctagtcttgaactcctgacctcaggcgatccgcccacctcggcctcccaaagtgctgagattacaggcataagccaccgcacccgcctcataaatttttttttctggagacttttaaggcaaattctggacatcatgccatttcacctgtacatgcatcgagatggatctcaacagataagaactgtttaaaagcatagccactatatcattatcacatctcacaaaattaacaataattccttaatatcatcaaatacccagcctgttcaatttgccggaaagggttttggtagacgttgcagaggctgctctggaatgggaatgctgagtgagtgccttcccctctgattgagactgagggagctgattatgcttatgctataggcagaccaaactgagtttgagcctggagatggaactctccgacagaacttgattcccgcagtccagagaagctacttcccacctgtcaactctgggaggggcaggagctactgggaatgggacgcccaggctccatactgaggcccccgatgcctgagcctactctatccccgtctaccctcccaggcccaccttgtgaactcctcgtgcccagggctgatgtgcgtcttccagggctactcatccaaaggcctaatccaacgttctgtcttcaatctgcaaatctatggggtcctggggctcttctggacccttaactgggtactggccctgggccaatgcgtcctcgctggagcctttgcctccttctactgggccttccacaagccccaggacatccctaccttccccttaatctctgccttcatccgcacactccggtaaggatggggcaggggcctggtcattgtaggcacgggggccccaggggtcctggagctgtctctgactgcataacaccctctgcagttaccacactgggtcattggcatttggagccctcatcctgacccttgtgcagatagcccgggtcatcttggagtatattgaccacaagctcagaggtgagtctggagtcggagtaggagtcaggagctggggaaggccattagggaggggcagtgaccaaacatgagccttcctcgctcccaggagtgcagaaccctgtagcccgctgcatcatgtgctgtttcaagtgctgcctctggtgtctggaaaaatttatcaagttcctaaaccgcaatgcatacatcatggtgagctacactgcaagcaaccctttgttctggtgccctttggtctagacacccccatcctggtccaggcagctcgccttggtaactctgacctttccacctccctcagatcgccatctacgggaagaatttctgtgtctcagccaaaaatgcgttcatgctactcatgcgaaacattgtcaggttaggctgctccccccccgctttgtggctccctcctctgatctcccacccaaggctggcttcgtgggtgtgctgtgctcagtcgggccctagacttagtttagtgctctgctcttgccatcttgaaacgtgaacaattttcattttgcaccagtccccacaaattacgaagccaatttcactctcagcattgccaggcctctcaccctcaacctgccctaacttctggcacagggtggtcgtcctggacaaagtcacagacctgctgctgttctttgggaagctgctggtggtcggaggcgtgggtaagggaccagaagctgtggggacagagggtaggggtgctgggcagctgaagaggtggcctcagaggtgcagcactaacccccagaattattccacaggggtcctgtccttcttttttttctccggtcgcatcccggggctgggtaaagactttaagagcccccacctcaactattactggctgcccatcatggtgagtgactcccctctctgctgctccacccccaactccccagaggaacccaataaccccaacgggtcatgtcttccagacctccatcctgggggcctatgtcatcgccagcggcttcttcagcgttttcggcatgtgtgtggacacgctcttcctctgcttccgtgagtgacacccccagccacctgtccccaaccttaaagtactgagccgttcaagcatttttttttttttttggagatttggtgcttctagaaacaatgcctttgtgagctaaacgaaccagagggagcttcttgtgacatcctgaggccaggcgtttagggaagaaggaagagagtgagcccccaggccggtaggctctccaaagaaggagcattctgatggagaggtctctgctatcttccctaagaaatctcgggtagaagttagccattagaggccaggcatggtggctcacgcctgtcatgccagcactttgggggaccgaggtgggcagatcaccctgaggtcaggagttcgagaccagcctggcccacatggtgaaacccctctctactaaaaatacaaaaaattagctgggcgcggtggcgggcgcctgtaatcccagccacttgggaggctgaagcaggagaatcgcttgaactcaggaggcggaggttgcagcgagccgagattgcgctactgcacttcagcttgggcgacagcaagactccgtctcaaaacaaagaaaaaagattaaaaaaaaaaaagagccattagagagacttcccagcaggtggctgtagcggcaggggattttcttactctacagcatgcatccattcagggtttgccagtctcctcctaagcgactgacatgcattttttccgctaattcttatcatcgctctatgcaacataatattcccgaccccacttcacaggaggaaactgagattacataacctgcccgggggtaagggtggtggtgcagcttggattccaaatcccgcaggcagcttgcctcccagtccccgatttcctggccccagggtccgctctaaccggtctctgttgcggctcagtggaagacctggagcggaacaacggctccctggaccggccctactacatgtccaagagccttctaaagattctgggcaagaagaacgaggcgcccccggacaacaagaagaggaagaagtgacagctccggccctgatccaggactgcaccccacccccaccgtccagccatccaacctcacttcgccttacaggtctccattttgtggtaaaaaaaggttttaggccaggcgccgtggctcacgcctgtaatccaacactttgagaggctgaggcgggcggatcacctgagtcaggagttcgagaccagcctggccaacatggtgaaacctccgtctctattaaaaatacaaaaattagccgagagtggtggcatgcacctgtcatcccagctactcgggaggctgaggcaggagaatcgcttgaacccgggaggcagaggttgcagtgagccgagatcgcgccactgcactccaacctgggtgacagactctgtctccaaaacaaaacaaacaaacaaaaagattttattaaagatattttgttaactcagtaaatctgtgactcattctctccacgacgacaggcggcctttttttttccgcgcccggctctttaaaatcggccccgcccctgtgacgtgtcctggtgccgcggccaatcaaaaagcccaataaggatggtgccagtcccttcttcaccccagccagtccgcttcccgttcgggtcacgcgctccgggcctccaagagggcctccaagagggccaatcggaagggcaagcttcgagatgctgcgtgatcacgtgggaggagatgagctacttgaagaccaattagagtccgggaagcgcggcggggcctccagaccggggcgggcttaagggtgacatctgcgctttaaagggtccgggtcagctgactcccgactctgtggagtctagctgccagggtcgcggcagctgcggggagagatgactggggagcgacccagcacggcgctcccggacagacgctgggggccgcggattctgggcttctggggaggctgtagggtttgggtgtttgccgcgatcttcctgctgctgtctctggcagcctcctggtccaaggctgagaacgacttcggtctggtgagtcaccctttgcatagccccatccccgacccgcgcaggtgatcgacacctagtgtcccccggaacgcgggcggctgagccgactttccgcgacaggacccttttctttctcccagaccccgtttcctcctaccgctcccagcccctctccctctccgggtccccgtccttctcctcattcgagccccttcctcttttggggtccccttccctccctgaaggcgccttctcctttcgtagaccctcccctgctccgagcctccagcttcgctccaaactccccttcgtgttcctctttcttgttctgggaccccatcccctactcgggatccccattagatcctccctctcccatcggaacgtgggttcctaaaacccccaagacaagtttgtctttgttgacccttcctcctcccatgacaggtgcagccgctggtgaccatggagcaactgctgtgggtgagcgggagacagatcggctcagtggacaccttccgcatcccgctcatcacagccactccgcggggcactcttctcgcctttgctgaggcgaggaaaatgtcctcatccgatgagggggccaagttcatcgccctgcggaggtccatggaccagggtataaagatgtctgggtgaaagagccggtgctaggttggatgggtgggcagcccaatgagcccaagggccctgaggataggggaacttagagggttggttgcctgagtccctgaggggtagagggaacccgagaagggcaagtgtctaggacagtgatctggaaattgggatcaccaaggagttggacattcacttagcaaacatttattgggtactatatacctataccaggcactattttaggtttcatgaatatagccacgaacaaaacagatcaaaaatctctgccctcaggatttaaattgtactggaaggagacagacaagcataataaacaagtaaacttttttgtctgttgcaaggtgataaatgcaatggagaaaaataaaacaggacaagaggtatagatagtgcaagtgttggattgcaccctgggaccatcggaaggcctgaggtccctagcagaaggtgggaaattaacgggaagtggtagaaagggtacctgcagagtgctcactctgggtttcttcctccaatttttttcaggcagcacatggtctcctacagcgttcattgtcaatgatggggatgtccccgatgggctgaaccttggggcagtagtgagcgatgttgagacaggagtagtatttcttttctactccctttgtgctcacaaggccggctgccaggtggcctctaccatgttggtatggagcaaggatgatggtgtttcctggagcacaccccggaatctctccctggatattggcactgaagtgtttgcccctggaccgggctctggtattcaggtctctgtcctaggagataggtggagggggctgccttgtggagagtctgagggatacccccaaatggactcctttccaaggggaagattctctgaagtcagattttctggcttgggtgggattccttgaaagacagggcatcctggtaggaacacattatcaggagaagagggaactctgccattggcttcccatttggcattgtcaacaggactgcgttagtccatgcaataccctcatgcaaagtagaaaaaggcactgcctctttggacagacacaagcctgtgccagggtgcacagcttggcgagtgagcacaggttgggtttaagctctcatgcaccctgtggctgggcccctggtgcacatgtccagctgtacaccctgggagagcttcttaattcaaacagggtgtgtatttatgggatctgactggaaccctcagtgagcaagggctgaactcaaggggaccatacatgtgattgcatttgggaagtggtgggttctctgtccctgcctctgagcccctagagtctccttctgtgacacccagttccctttcccacagaaacagcgggagccacggaagggccgcctcatcgtgtgtggccatgggacgctggagcgggacggagtcttctgtctcctcagcgatgatcatggtgcctcctggcgctacggaagtggggtcagcggcatcccctacggtcagcccaagcaggaaaatgatttcaatcctgatgaatgccaggtcaggagtccatgagatgttccctacccatttgaccctccctgccctccagaacatcatttcacgcacagacccagggtctgactgctccactcagtgccacacacccttgctcccctcggggacagggcattttccctgttccctccctgaggtcctgtcctctcccctcagccctatgagctcccagatggctcagtcgtcatcaatgcccgaaaccagaacaactaccactgccactgccgaattgtcctccgcagctatgatgcctgtgatacactaaggccccgtgatgtgaccttcgaccctgagctcgtggaccctgtggtagctgcaggagctgtagtcaccagctccggcattgtcttcttctccaacccagcacatccagagttccgtgagtgcctcatgggtggggtcagcagggagagccctgtgtctagacaaggcctgggcagagaccctctctccctgactctcctgctctccccaggagtgaacctgaccctgcgatggagcttcagcaatggtacctcatggcggaaagagacagtccagctatggccaggccccagtggctattcatccctggcaaccctggagggcagcatggatggagaggagcaggccccccagctctacgtcctgtatgagaaaggccggaaccactacacagagagcatctccgtggccaaaatcagtgtctatgggacactctgagctgtgccactgccacaggggtattctgccttcaggactctgccttcaggaacacgggtctgtagagggtctgctggagacgcctgaaagacagttccatcttcctttagactccagccttggcaaaatcaccttccctttaccagggaaatcacttcctttaggactgaaagctaggcgtcctctcccacaaaaaagtcctgccctcatctgagaatactgtctttccatatggctaagtgtggccccaccaccctctctgccctcccgggacattgattggtcctgtcttgggcaggtctagtgagctgtagaattgaatcaatgtgaactcagggaactggggaaggctgagcctcctctttggtgttgcggtaagataaccgacagggctggtgaaagtccccagatggcaggatatttggtttcagagtaaggactaggtgcaccaccatgactgactatcaatcaaaatgtttgtaacttaaaatttttaatgaaggataatgaatatttgtagagtctctatggttctgtcaatgcacatcttcgtgtctgttttcctcatgtatccttgtgagcctgggtgagttctggggagagacctgatgtgcgtactgcctgtgaaaatctgactttggcaaatcaaatcctcttttccttttgacatgccctctttttttgttgttgctttttttgagacagggctcgctctgtcacccaggctggagtgcagttgcacaatcacggctcactgaagcctcaacctcctgggctcaagtgatcctcacgtctcagcctccggagtagttgggactacaggtcagtgacaccatgcctggttaatttttttaatttttattttcagtagagacaaggttgcgctatgttgcccaggctggtatggaactcctgtgcttaagcaatcctcatgcctcagcttcccaaagtgctgaggttacagctatgagccaccgcacccagcctacattccttcttatcaccgagaaacaggttgatcttcacaggtgtaatgagtatgaagggagtgccataagatattttttattttttatttatttattttttaatttaatttttttttttttgagatggagtcttgctctggcacccaggctagagtgcagtggtgcgatctcggctcactgcaacctctgcctcccaggttcaagcgattcttctgcctcagcttcccgaatagctgggattacaggtgcccaccaccacacccggctaatttttgtatttttagtagagacggagtttcaccatgttggccaggctggtctcaaactcctggcctcaggtgatccacccgcctcggcctcccaaagtgttgtgattacaagcatgagccatggtgccggcgggctgatttttttaatttttagtagagacaaagtctcactatattgcctaggttggtctcaaactgctgagctcaagcaatctgccggccatgttctctcaaagtgctgggattacaggcttgagcccctgcacccagcctgtaagatattttaaaatccacacttggccaagcgtggtggctcacacatataatcccagcactttgggaggccaaggtgggcggatcacaaggtcaggagttcgagaccagcctggccaatatggtgaaatcccatctctactaaaaatacaaaaactagccaggcgtgttggcttacacttatagtcccagctactcaggtggctgaggcaggagaatcacttgaaccaggaggcggagtttgcagtgagctgagatcacagcactgcacaccagcctcggcaacagagtgagactccgtctgaaaaaaaaaaaatccacgctgttttatatttctaacatggggtaggataccatcctccatgaaatagggtgcaagtgtgtgaaatgcagatgggaatcctgtcccagctagcctgacagagaagtgagcacttcctatggcaaattatgtaagaaaatattccccaggcagatgcttatgaaaagaatctgttcagcctgcaggtaagtgggagagcccttgctcaaaaaaaaaaagaaaaagaaatagtggaagacaaaaaggaaaggacactatgaatgtctgacccatgaactactacctgttagaaacagaagtgctgggaggcttgagagacagacactaccttcctggctaggtgtggtggctcagatctgtaatgctagcacttcgggagaccaaggcaggatgatcaaattaaagggcatcctgggcaacatggcaataccccatgtctaaaaaatttaaaaattagccaagcatggtaacgcacacctatagtcctagctacatgggaggatggcttgatctctttgaccccaggagttcgaggcagtagtgagctatgattgcaccactgcacaccaacctaggtgacagagtgagacctcatctccaaaaaaccaaaccaaaacaaaaaaccttcaagaaagaaaaaaagcttgaccttccctccctcactctttacagacccatggaatctgaagctctggtgttggagccaccaggcattaacaagccttctgggtgattcgtaatacgtttaagtttgaaaaccagggtcagaacttttaaacaagtgcaagtgtccagctaaaatgaattatatgtacgtcaaagttgcagaaatagttaaagaaccttttttttccagctttttttttttcttttaatacacagggaagggtcaggtgcagtggctcacgcctgtaatcccagcactttgggaggccgaggtgggcggatcacaaggtcaggggttctagaccagcctggccaacatggtaaaaccccatctctactaaaaatacaaatattagccatatgtggtggcacacgcctgtagtcccagctactcgggagcctgaggcaggagactcacttgaacctgggaggcagaggttgcagtgagccgagattatgccactgccctccagcctgggcgacagagcaagacttcatcttaaaaaaaaaaaaaatacacaggaaagattgggacaagtggcaggagactgaaaggggaaagagcttgtttgtactaatgggacaaagtgggccgactctgggcacactgcttatgagttagctctactctgtgaggaaattttttttttttttttgagacggagtcttgctctgttgcccaggctggagtgcagtggcgcaatcttggctccccgcaacctctgcctcgctggttcaagcaattcccctgcctcagcctcctaagtagctgggattacaggcgcctgccaccacgctcggctaattttttggtatttttagtagagacccggtttcaccatgttggccagactggtctcgaactcctgacctcaggcaatacgcccgcctcggcctcccaaagtgccgggattacaggtgtgagccaccccacccggccaaggaaatatttaaaaaataaaataaaataagttatttaaaaattggggcaagttggctgggcacggtggctcacgcctgtaatcctagcactttgggaggctgaggaagggggatcacttgaggtcaggagttcaagaccagtctggccaacatggtgaaacactgtctctactaaaaattcaaaaaattagccaggcattgtggcaggcacctacaatcccagctactcaggagactaaggcaggagaatcgcttgaacctgggagacggagattgcagtgagttgaaatcatgccactgcactccagcctgggctatggagcgagactctccctcaaaaaaaaaaaaatcggggtaagtgttatcaatctaaaaaataataattaaaaagttcagaatctaggccaggcgctgtggctcacacctataatcccagcactttgggaggcagaggcaagcgaatcacctgaagtcaggagttcaagaccatcctggtcaacatgacgaaaccccgtctctaccaaaaatacaaaaattagctgggtgttgtgggtcgcgcctgtagtcccagctattcaggagactgaggaaggagaatcgcttgaacccgggagcgagaggttacagtgggccaagatcataccattgcattccagtctgggagacacagcgagactgtcttaaacaaacgaacaaaagctgagaatctagtgttgttgctttttacagatggagtcttgccatgttgcccaggttagattcagactgaagttcaagggatcctcctgcctcagcctcctagagtagatagagttgggactgcaggcacataccactgtaccaggcttagaatctagtttaaagagtttatccaccggctctccctccctctccctctgtctccctctccccacggtctccctctcatgcggagccgaagctggactgtactgctgccatctcggctcactgcaacctccctgcctgattctcctgcctcagcctgcccagtgcctgccattgcaggcacgcgccgccatgcctgactggttttggtggagacggggtttcgctgtgttggccgggcaggtctccagcccctaaccgcgagtgatcccgccaacctcagcctcccgaggtgccgggattgcagacggagtctcgttcactcagtgctcaatggtgcccaggctggagtgcagtggcgtgatctcggctcactacaacctacacctcccagccgcctgccttggcctcccaaagtgccgagattgcagcctctgcccggccgccaccccgtctgggaagtgaggagcgtctctgcctggccgcccatcgtctgggatgtgaggagcccctctgcctggctgcccagtctggaaagtgaggagcgtctccgcccggccgccatcccatctaggaagtgaggagcgcctcttcccagccgccatcacatctaggaagtgaggagcgtctctgcccggccgcccatcgtctgagatgtggggagcgcctctgccccgccgccccatctgggatgtgaggagcgcctctgcccggccgagaccccgtctgggaggtgaggagcgtctctgcccggccgccccgtctgagaagtgaggagaccctctgcctggcaaccaccccgtctgagaagtgaggagcccctccgcccggcagctgccccgtctgagaagtgaggagcctctccgcccggcagccaccccatctgggaagtgaggagcgtctccgcccggcagccaccccgtccgggagggaggtggggggggtcagccccccgcccggccagccgccccatccgggagggaggtggggggtcagcccccccgcccggccagccgtgccatccgggagggaggtgggggggtcagccccccacctggccagccgtgccgtccgggagggaggtgggggggtcagccccccgcccggccagccgccccgtccgggaggtgaggggtgcctctgcccggccacccctactgggaagtgaggagcccctcagcccggccagccaccccgtccgggagggagatgggggggtcagcccccccacccggccagccgcccggtctgggagggaggtgggggggtcagccccccgcctggccagccgccctgtccgggagggaggtgggggggtcagccctccgcccggccagccgccccgtctgggaggtgaggggcgcctctgcccggccgcccctactgggaagtgaggagcccctctgcccggccagccgccccgtccgggagggaggtgggggtgtcagccccccgcccggccagccgccccgtccgggagggaggtggggggggtcagcccccccgcccggccagccgccccgtccgggaggtgaggggcgcctctgcccggccgcccctactgggaagtgaggagcccctctgcccggccagccgccccgtccgggagggaggtgggggtgtcagccccccgcccggccagccgccccgtccgggagggaggtggggggggtcagcccccccgcccggccagccgccccgtccgggaggtgaggggcgcctctgcccggccgcccctactgggaagtgaggagcccctctgcgcggccaccaccccgtctgggaggtgtgcccaacagctcattgagaacgggccaggatgacaatggcggctttgtggaatagaaaggcaggaaaggtggggaaaagattgagaaatcggatggttgccgtgtctgtgtagaaagaagtagacatgggagacttttcattttgttctgcactaagaaaaattcctctgccttgggatcctgttgatctgtgaccttacccccaaccctgtgctctctgaaacatgtgctgtgtccactcagggttaaatggattaagggcggtgcaagatgtgctttgttaaacagatgcttgaaggcagggtgctcgttgggagtcatcaccaatccctaatctcaagtaatcagggacacaaacactgcggaaggccgcagggtcctctgcctaggaaaaccagagacctttgttcacttgtttatctgctgaccttccctccactattgtcccatgaccctgccaaatccccctctgtgagaaacacccaagaattatcaataaaaaaataaatttaaaaaaaaaaaaaaaaaaaaaaaaagagtttatccaactgcaaatgttgaggaagtggcccgtctagagctgaagattccaaagaatattagtctatgttccaaaagtgtagaagtttggaatcgcttatataaacagaaagtttatggaaacttagaatttcaacattgttctgtgttcacaattggtgggttcttggtctcattgatttaaagaatgaggccgcagaccctcacggggagtgttacagttcttaaatgcggcgcctctggagttgtttgttcctcccggggggttcgtgctctcgctagcgtcaggagtgaaactgcatacccctgcggtgagtgttacacctcataaaagtagtgtggacccaaagaacaaatagcaataaaatttattgcaaagacggaaataacaaaccttccactctatggaaaatgaccagagcgggatgtcactactcactcaggcagcctgcttttattcccttatctggccccacccacatcctgctgattggtccattttacagagagctgattggtccgttttacagagagctgattggtccattttgacagggtgctgattggtgcgtttacaatccctgagctagacacaaaagttctccatgtcctcactagattagctagatacagtgtcgattggtgcatttacaaaccctgagctagacacaggatgctgattggtatatttacaaaccttgagctagatacagagtgccgattggtgtatttacaatcccttagctagacataaaggttctccaagtccccaccacactcaggagcccagctggcttcacccagtggatcccgcactggggccgcaggtggagctgcttgccagtcctgccccatgcgcctgcactcttcagcccttgggaggttgatgggactgggggccgtggagcagggggtggcgctcgtcggggaggctctgcagcacaggagcccacggcggggttggggctcaggcatggcgggctgcaggtcctgagtcctgtcctgtggtgaggcagctaaggccccgtgagaaatcgagcacagcaagctgctggcccaggtgctaaacccctcactgccctgcccggggcttgtgggccagcctgccgctccaagagcggggcagccgagcccacgcccacccggaacttgcgctggcccacaagcgctgcgtgcagccccggttcccgcccgcgcctctccctccacacctccccgcaagccgagggagccggctccggcctcggccagcccagagaaggctcccacggtgcagtggcgggctgaagggctcctcaagcgcggccagaatgggcgccaaggccgaggaggcgccgagagccagcaagggctgcgagggctgtcagcacgctgtcaactctcagttctatggtaaggcttattgcatagttacaatgatctgattagtcaattttttttttcttttttggggggtgggggaaggtgttttttacattccacactgaagatgcaatagtcatggggtcttgggtgccatctggtctgagtcaggtacaggacaataaaggaggcagttaatctacaacaaagatcagtgattggaaaggaggtctcattacagaacaagagcaatgaggaggagagtctgtaagaagcagaattgcaaacatgctacatgactcagtctccaaggcttaacttccatcttggcataaacttagagtcctgaagttttgttttctttttacggtggactttgcacatcattgcctggtgagtgcccgctggatcagcagccaaattctagcatgaaaccctttccccaacatcccctttcaccttgcatggccctccttcccttcacacattgatccccactcccagcccctttgcttaggatcaaaccagctcaagctctctctgtcttctcagctgtcccttaaataagggaaagagacagtaacaatgaacactgacctgaacagcaaataccagggaccagggaccatggatacttttttgctaatgtaatccttccaaccaaaagtcatgacaaggagggaataggaaaaagtatttttttttttttttgagacagggtcttactctgtcacccaggctggagtgcagtagcatgatcacagctcactgcaaccttgaccacctgggttcaagcaatcttcccacctcagcctcctgagtagctgggactacaggcacttgccaccaagcccagctaatattttcatttttgtagaaacagggtcccactatgttgcccaggctggtcttaaactcctgggctcaagtgatccttgaccaccccacccgctcggcctcccaaagtgctagagttacaggcctgcccacccatagccatctaataatttttgcccaagaaaggattgggaaggaagatcaaagcaatggcttggacatctttccaacaacaacaacaacaacaacaaaaccacaacagactcaaattaccatagtagaagtataggtcttccttttcctaatactctgggatttttttttttttttgagacagagtcttgctctgttgcccaggcaggctggagtgcagtggcgtgatctcaactcactgcaacctccgtgtcccaggttcaagtgattctcctgcctcagcctcctgagtatttgggattataggtgcccaccaccacacctggctaattttttgtatttttagtagagatgggttttcaccatgttgaccaggctggtctctactaaaaatacaaaaattagctgggtgtggtggcatgcccctgtagtctcagctactcgggaggctgaggcagaagaatcgcttgaacctgggaggcagaggttgcagtaagccgagatcatgccactgcactccagcctggtgacacagtgagactctgtcccaaaaaaaaaaaaaaaagaggccgggcgcggtggctcatgtctgtaatcccagcattttgggaggccaaggcaggcgaatcacctgaggtcaggagttcaagaccagcctcaccaacatggagaaacccagtctctactaaaaatacaaaattaggctgggcacagtggctcacgccacccagcactttggggaggccaaggcgggcggatcacctgaggtcaggagttcaagaccagcctggccaacatggtgaaacccccgtctctactaaaaatacaaaaattagccaggcgtggtagtgcatgcctgtaatgccagctactgaggaggctgaggcaggagaatcgcttgaacccgagaggggaaggctgaagtgagccgagatcacgccactgcactccagcctcggcaacaagagcgagactctgtctcaaaaaaaaaaaaaaaaaaaaaaagctggccagaggcggtaattacatgcctgtaatcccagtcccagtactttggaaggccaagacgggcagatcatttgagcccaggagtttgagaccagcctgggcaacatggcaagacctcatctctacaaaaaatttaaaaattagctggggcagtggcccacacctgtagtttcagctacatgggaagctgaggtgagagggtcacttgagcccaggaggtagaggctgtagtgcaccaagaccgcaccactgccctcaaacctgggcgacagggcaagaaacttgtctcaaaaacaaacaaataagaaacccacagcacattaggtcaaatacttttataaaaaatttttttaggccgggcacggtggctcatgcctgtaatcccagcactttgggaggccaaggcgggcggatcacaaggtcaggagatccagacctcctggctaacacggtgaaacactgtctctactaaaaatacaaaatattagccgggcgtggtggcgggagcctgtagtcccagctacttgggaagctgaagcaggagaatggagtgaacctggaaggcagagcttgcagt

SEQ ID NO: 212 - DNA, 1803 bp, Homo sapiens
cacgcgctccgggcctccaagagggcctccaagagggccaatcggaagggcaagcttcgagatgctgcgtgatcacgtgggaggagatgagctacttgaagaccaattagagtccgggaagcgcggcggggcctccagaccggggcgggcttaagggtgacatctgcgctttaaagggtccgggtcagctgactcccgactctgtggagtctagctgccagggtcgcggcagctgcggggagagatgactggggagcgacccagcacggcgctcccggacagacgctgggggccgcggattctgggcttctggggaggctgtagggtttgggtgtttgccgcgatcttcctgctgctgtctctggcagcctcctggtccaaggctgagaacgacttcggtctggtgcagccgctggtgaccatggagcaactgctgtgggtgagcgggagacagatcggctcagtggacaccttccgcatcccgctcatcacagccactccgcggggcactcttctcgcctttgctgaggcgaggaaaatgtcctcatccgatgagggggccaagttcatcgccctgcggaggtccatggaccaggaaacagcgggagccacggaagggccgcctcatcgtgtgtggccatgggacgctggagcgggacggagtcttctgtctcctcagcgatgatcatggtgcctcctggcgctacggaagtggggtcagcggcatcccctacggtcagcccaagcaggaaaatgatttcaatcctgatgaatgccagccctatgagctcccagatggctcagtcgtcatcaatgcccgaaaccagaacaactaccactgccactgccgaattgtcctccgcagctatgatgcctgtgatacactaaggccccgtgatgtgaccttcgaccctgagctcgtggaccctgtggtagctgcaggagctgtagtcaccagctccggcattgtcttcttctccaacccagcacatccagagttccgagtgaacctgaccctgcgatggagcttcagcaatggtacctcatggcggaaagagacagtccagctatggccaggccccagtggctattcatccctggcaaccctggagggcagcatggatggagaggagcaggccccccagctctacgtcctgtatgagaaaggccggaaccactacacagagagcatctccgtggccaaaatcagtgtctatgggacactctgagctgtgccactgccacaggggtattctgccttcaggactctgccttcaggaacacgggtctgtagagggtctgctggagacgcctgaaagacagttccatcttcctttagactccagccttggcaaaatcaccttccctttaccagggaaatcacttcctttaggactgaaagctaggcgtcctctcccacaaaaaagtcctgccctcatctgagaatactgtctttccatatggctaagtgtggccccaccaccctctctgccctcccgggacattgattggtcctgtcttgggcaggtctagtgagctgtagaattgaatcaatgtgaactcagggaactggggaaggctgagcctcctctttggtgttgcggtaagataaccgacagggctggtgaaagtccccagatggcaggatatttggtttcagagtaaggactaggtgcaccaccatgactgactatcaatcaaaatgtttgtaacttaaaatttttaatgaaggataatgaatatttgtagagtctctatggttctgtcaatgcacatcttcgtgtctgttttcctcatgtatcc

SEQ ID NO: 213 - protein, 146 aa, Homo sapiens
MTGERPSTALPDRRWGPRILGFWGGCRVWVFAAIFLLLSLAASWSKAENDFGLVQPLVTMEQLLWVSGRQIGSVDTFRIPLITATPRGTLLAFAEARKMSSSDEGAKFIALRRSMDQETAGATEGPPHRVWPWDAGAGRSLLSPQR

SEQ ID NO: 214 - DNA, 2066 bp, Homo sapiens
tcacgcgctccgggcctccaagagggcctccaagagggccaatcggaagggcaagcttcgagatgctgcgtgatcacgtgggaggagatgagctacttgaagaccaattagagtccgggaagcgcggcggggcctccagaccggggcgggcttaagggtgacatctgcgctttaaagggtccgggtcagctgactcccgactctgtggagtctagctgccagggtcgcggcagctgcggggagagatgactggggagcgacccagcacggcgctcccggacagacgctgggggccgcggattctgggcttctggggaggctgtagggtttgggtgtttgccgcgatcttcctgctgctgtctctggcagcctcctggtccaaggctgagaacgacttcggtctggtgcagccgctggtgaccatggagcaactgctgtgggtgagcgggagacagatcggctcagtggacaccttccgcatcccgctcatcacagccactccgcggggcactcttctcgcctttgctgaggcgaggaaaatgtcctcatccgatgagggggccaagttcatcgccctgcggaggtccatggaccagggcagcacatggtctcctacagcgttcattgtcaatgatggggatgtccccgatgggctgaaccttggggcagtagtgagcgatgttgagacaggagtagtatttcttttctactccctttgtgctcacaaggccggctgccaggtggcctctaccatgttggtatggagcaaggatgatggtgtttcctggagcacaccccggaatctctccctggatattggcactgaagtgtttgcccctggaccgggctctggtattcagaaacagcgggagccacggaagggccgcctcatcgtgtgtggccatgggacgctggagcgggacggagtcttctgtctcctcagcgatgatcatggtgcctcctggcgctacggaagtggggtcagcggcatcccctacggtcagcccaagcaggaaaatgatttcaatcctgatgaatgccagccctatgagctcccagatggctcagtcgtcatcaatgcccgaaaccagaacaactaccactgccactgccgaattgtcctccgcagctatgatgcctgtgatacactaaggccccgtgatgtgaccttcgaccctgagctcgtggaccctgtggtagctgcaggagctgtagtcaccagctccggcattgtcttcttctccaacccagcacatccagagttccgagtgaacctgaccctgcgatggagcttcagcaatggtacctcatggcggaaagagacagtccagctatggccaggccccagtggctattcatccctggcaaccctggagggcagcatggatggagaggagcaggccccccagctctacgtcctgtatgagaaaggccggaaccactacacagagagcatctccgtggccaaaatcagtgtctatgggacactctgagctgtgccactgccacaggggtattctgccttcaggactctgccttcaggaacacgggtctgtagagggtctgctggagacgcctgaaagacagttccatcttcctttagactccagccttggcaaaatcaccttccctttaccagggaaatcacttcctttaggactgaaagctaggcgtcctctcccacaaaaaagtcctgccctcatctgagaatactgtctttccatatggctaagtgtggccccaccaccctctctgccctcccgggacattgattggtcctgtcttgggcaggtctagtgagctgtagaattgaatcaatgtgaactcagggaactggggaaggctgagcctcctctttggtgttgcggtaagataaccgacagggctggtgaaagtccccagatggcaggatatttggtttcagagtaaggactaggtgcaccaccatgactgactatcaatcaaaatgtttgtaacttaaaatttttaatgaaggataatgaatatttgtagagtctctatggttctgtcaatgcacatcttcgtgtctgttttcctcatgtatc

SEQ ID NO: 215 - protein, 413 aa, Homo sapiens
MTGERPSTALPDRRWGPRILGFWGGCRVWVFAAIFLLLSLAASWSKAENDFGLVQPLVTMEQLLWVSGRQIGSVDTFRIPLITATPRGTLLAFAEARKMSSSDEGAKFIALRRSMDQGSTWSPTAFIVNDGDVPDQLGAVVSDVETGVVFLFYSLCAHKAGCQVASTMLVWSKDDGVSWSTPRNLSLDIGTEVFAPGPGSGIQKQREPRKGRLIVCGHGTLERDGVFCLLSDDHGASWRYGSGVSGIPYGQPKQENDFNPDECQPYELPDGSVVINARNQNNYHCHCRIVLRSYDACDTLRPRDVTFDPELVDPVVAAGAVVTSSGIVFFSNPAHPEFRVNLTLRWSFSNGTSWRKETVQLWPGPSGYSSLATLEGSMDGEEQAPQLYVLYEKGRNHYTESISVAKISVYGTL

SEQ ID NO: 216 - DNA, 28449 bp, Mus musculus
attctctcttgctttttgtaaaggtgtgtgtgtttgtgtgtgtgcgtgtatgcatgtgccatatgcataagatggaggacaacttgtatgacttggttttctgcttcttccatcatgagttctgggactcaaactcaggtcatcaggtttagtggcatgtgcctctattcactgagctatctcactacacgccaatctactcagcttacaattctattttgttttggttttggttgttttgagacaaggtctcattatgtagccttggctgacctggaactcatagagatctgcctgcctctgactcggatgggattaaacacatggtggccatgcccaattcatcttacaacactttttaaaaaaataattatttattttatgtatataagtacatcttagttgtcttcagacacaccagaagagggcatcagattccattacagatggttgtgagccaccatgtggttgctgggaattgaactcaggacctctggaagagcagtcagtgttcctaacagctgaggcatctctcttacaactctttttgttgttgttgttttgttttgtttttcaagacagggtttctttgtgtagccctggctgtcctagaactcactctgtagaccaggctggcctcaaactcagaaatccgcctgcctctgcctcccaagtgctgggattaaaggcatgccccaccaatccaggcttctcttacaactcttaataatggtcatcccttagtagagaaagctgatttgaccctcaactatgagagtaaatgttgacagggtgatgagaacacagggtctatctagtagaaaggacttacaaggagtttgaggacgagatcctgaaaattaaaatccaggtaaacagaggtgccatgatcagtttaattgtcaactagacacagtctagaactactctgagggattatcttaatcacattctttgatgtgagagaacccacccactataagcaacatcattccctgagcttgagaacctagactgaataaaaaggagaaagctcgttatccacagggatgtttgcagctgtgctgacaacataaaatgaagactatcctagctactccactaggttctagatgggcagttggtatttctagtactgctaattgaaagagtgttttgtagactgctataataggcctcagtactcagtgtgtatttgtttataaacccatgtctgaggccactcacctgagcagcttctgtccccacttacagcggcatctgttgaggattcctgtggggtatgcatagggagtgaactggttacaaggtaggctggtctggaggcccagatacagaacacaaaagcagccaaattagtgcctagctacaaattggattatcatgtgagggtaggaaaagggatggacacccagtcaggaaaatatataaacgggcatagccacaactcacaaaagcccatcacaatatctaaaactaaagcataacccagtgagaagctagacacttggagtcgcatccctaatagactccaaagccagaagaaccagataaaaactatatgaagcagttctaaaactcctcagtggacacacccatacaaagccagagactgaacacagtattgttaaggtcacagctgacaagcaaattacactatatggctagagtctatgaaggagcttgagtcaggtgggcacagagactgagatacctgggctggtgtggaaaggccatctggcaatgtcagtaagccagaagagagagagagagagcgcgcctgcgcatggctatagagtcaattgcttttctagcatgttttcagagtgtggggtgagcaacaggccacacctaccaaaaaggctgagcccctccttcagcccactggctactttgtacaccgaggggtgagactcactcttgaaaatctgtagaacgctgtcacagagaaatggaggagtctgaatttctatgcatcccacatgtggtatatgcatgcatgtacatatttggttttgagacagggtctctctatgtagccctggctatcctggaactcactatgtagacgaggctggtctcaaacgtatagaaatcccactgcctctgcctctcagtgctgggattaaaggtgagccaccacacttgcctgtgtgcacatatttgtatgcaggtgaacatgctcctgcacatatatgcagaggctttgttctctccatctcgttctcttttaagacaaggtctctcattgaacccggaattccccattttctttggctaagctggcagccagtaaaacccagcagtcctgtctccacccacgccagcaccaagactgcaggcacacaaacctcagtgagtggctttttatgcaaatgcttagaatccaaactcagatcctcaaacttgtgtagcaaaagcttttactcactaaactatgttcctatacatactgtaatggatttttttttttataataaagggagttgagaattaagaatagaaatgtgatttaagttaataataagcttcttatttcatgtctagcaacagtaatctcgatgtgtggtttattactcacttctttttttttttttttttaaagatttatttattattatatgtaagtacactgtagctgacttcagacacaccagaagagggcatcagatctcattacgggtggttgtgagccaccatgtggttactgggatttgaactcaggacctctggaagagcagtcagtgctcttaacccctgagccatctctccagtcccctattactcacttctgtttgacttagcttctccccttaggaaaggaaagaaaagccaggtatggtgtctcataccagtaacccaagcactcagaacgcagaggcaggcagggagtttgaggccagttggtctagatagtgggttccagaacagccagggttacatggagagaccctgtctcaaaaaagaaaggaggaaaaaagaaaaagtaaacaaaaggaaggaaggaaggaaggaaggaaggaaggaaagaaaagggtgggttgaagttgtcactcaagagcagggtacttgggctggagcgatggctcagtggttaagaacactgattgatcttccagaggtcctgaagttcaattcccagcaaccacatggtggctcacaaccatctgtaatgagatctgacgtcctcttctggtgtgtctgaagacagtgatggtatactcacatacatgaaataaataaatctttaaaaaaaatagggggggtttcttgtctagcaagcaccagtccctcagttaattcaaagttgcaaagaggaaggacggtgattcctctgtgccccttcctttcctttaccctcatccacacaatcacccttttctttccttcaagccccaggattaaagaagccagagcctcagtaggattatcagagccttaaactcgtcctttgtttctgcaggcagcagcttgtctccacctcacctgtaagtgtcttgatctatgctcaccagatgggtcctaagaacagaaaaagccgcaagaacggtgtctgaggcatgaggagtcactactaaactactcctctctcccaatacctctccaagcaatccaatctttctggttctcctgtgccagagcacacttcagccactgcccttcatctgtacacatacagacacacacacacactcacacagagaaatacacatgcacacaccctttcttcttagacctcccagtcctctttactttggttgaggtttggatgagtcacctacaatacaaacttcttgaatcccaggatagggacgccaacatcatagtcttccagttcaaccccaattcttcttcgactcaggaacttgagcagtcctccaagtgcccggacctgggaggggatcagcagtgaagttggatgaagcctagtgttccagaagctagacgacactactatcaggaaaaccgtgatttttacagggctgggcagtccagtcacaattctgccctgtggctgggagctcatgcctttccccagctgcatcctagccctcaccccatgacccagctcaccgtgaggacacagtcaaagggaataatggaggagaggaaaaggattttctcagtagcagtcatggagtctgagatgaaggagtagtttccggaaaggagacgctgtttgcttatctctggacctatttggggaggatggggagtgaaaggtctcataggtccattctcttgccccagtttaacaataagaacaaatctgaccatatggcttgtccaaggccatagaggtggttaaggaaagctaaagaaagaatcaaaacatacagatgtagtctcattctttcggttctttatgtaatgtagatgtctggctataagcacaacctgagagagacaagtgactcaggaggcaaaaggtcaagatggcagggattgtggatatatatggaactaatactaatactgcccatttcctgtatttcctgtcctttttgcaaacctggaagtttgcaaagtagggagtgccttatggaccatggttcccagaaacagtgccgtttcctttttaatgcaacaaaggactttggctccaacgttcaaaactgtttttaagagtatcatctctccattttcttccactcccccattcctcacatacctaaccccatagtttctcagtaagttgtactaaagatagtaaaggtgcaggagagatctcggggagactcatgatggggtgtgggaagcagcttccagataagagtacatgaggcaaggtttctgataataggagctcctttcagagaaaggacagaggccctgggatgggggctggtaacataaaaggaaggagctaccaaaatccacgcttggcagaagtatgatttcaggtccctttggctctctgtgctcctcggaggctgtggaggcaagaggccacagtcttgtacagttcaggcctgtcattgtcccatgctccctcccagccaaagatttagtagtctatttccatttccccttctctatgcaatccttaccaagcttccctagaaatcgagtcatagcctcatcctgtttggcacttgtgacaacagactgggggttgatttcatccagaacttgaagagagaaggaaggtgcctgatgagtcgaaggatatctccactgtgactaagaggaaagtggtggctctcttcctgccactgtctgttctcctcaagaatttatcatcttagccaggcatggtgacacatgcctttgaccccagcccttgggaggcaggggaatctccatgaaatcaaaatctgcctgatctacacaataggtttcaggataaaccagagccacatagtacatagtgagaccctgtctcaaaaaaaaaccaaaaccaaactaaagttattttatgtctgtaagggatggtctgcacactgggagcgcagtggaggagacttagtaaaggcacggtgggaaggaacaagagtgtcctggaaactatcactaaaatcatggtttgccagggacaaaatctgtagcatttcacatacagtaggtacctaataaagttgtgttgaataagtaattcctaaatcaggtgactataaactacatgaggatgtatgagtgaacacacgtcccaccccagaggagaggaatgcagggctctgtcgcacctctctggagaagctttaggctctcgtggtctggggcatctggcatgaagtggatagtggagtcactagtgtcatagtaagcaatgcccaggtatcccgagctccacagcacgcacagatggatctgtcccgcgaggaaggaaaggggatcgatatctgaatccctcggaagggcatggattggtcatcccttattattaatcatttaaccaaatctcggagataggcactcatggggagtttagtcaacgtgaaacggggtcggctcagcctctcccagccctcccaactccgcggacacctcggcgggctcctcctcgtcctcttcctcgatacctccaggccccgccattgggggctgagggctggggaagctggctgaggggattccggatctgggtccgggtcccggcggcgtccggcctggggtcgctctgaaagccatgggctcggcgactctgaggacatgggaggggaaggaggtccaaaagcagcattcagcaggcggctggtgcgcgggctttcaggggacaggcgcgggggctgcccctttaggttgggagcagctccgagctactgtcccaccctcattcctgtcactcgaagccgtgctttggaagctctgacggagcgcgctgtcacgtcaagtctctcccgccacccacgcccttacagccgcagcgcgctctcctgacccacccccaccccctcccccacccccaccccactggagccgccaattcgcagcactttcccgccttttccgtcacctcagccgcgacgatccacctccctgaccaaccgccgcaagcctgcagcctgtaggcgtgggccgcgcgcgctcgccccgcccccttagtggctgaaagggtctgcttagccatccaacgggaaggcggtgaggacgctagatgtcgattggtccgtttgcattgggggcggtgctagagtgttcaaaattcccgccctctgccgttgctaagcagccgtgtcgcagagctttgattgatgttgggcggagcccgccctaaactaaggtccccgcctggaaaaagggtctgggccacggtggagaaggccagagcccggaggccgaccttaaagggccagaggcagtcttcctccttcctgaagagtggagagaagcaacattaattcaacctgtgccaacagcaacaactccgttaatatttgtacccactaagttaatatttataaaaaactcagaacagtgcccagcaaacaaagtaagcgctacatgagtgttttaaataaataagtggaagtaagaactaactcctgtttcagacctactttgcctgtttcctgattgcaggagatgatcaccaaccacaggagcaacacggggcttgattattttggaacccctgaagaggaagtataagtatctgaaagacactaaattctgaaagtagacctaattagaacacatacaaccatactacagtcctctcacccctaaggacacagggtatctctgactgatgatccatctggatgggaaagaaggagaaggaaggagtttctgagggaaagaaaaaaaaccatactttacaaaacaataaacaaacaaacaaaaacttcagtgctggcttagcaggtaaaagtaccttcaattttgtacccagattgtcctctgtcctccatacctgtgctgcttgtacacacacactcacactcacactcacacaccacataattttttaaaaactgtcctagctacactaaactaagatcctgcctgaggttcagaaatggcatgaggtgacctggctctgctgatcagcgactggaaaaatcatctccaaaggggagcaggtctaagggctgggttaatggttactcttggcaaattattgagcaatggagttatggaaacctggaagaggttattggtgacagctctggggagtggcagagagggacacaccttccattctggggtatgaagagattagggactggtttaccaagaagaggaagggatcagacccaggaagagaaggcagcagaagaaaagaagagctggagaaagaagaagtgggagctcagagataagatggcagtctacattttttttttttttaatgcagtcctggcttcaaatccaggagcactgctgggtgatcccaggacagagcagcctggaaaataaaggcaagataacgcatttgtgtgtgcgtagcaattcaggcagccacagtcaatagtgatgatcagagcagctgcggccataaagacagccaagagaggcagccaaacctgtttgaatctaaagtttctcccagcgatctaactgtgagcagattgcccgctggccacttgctgaccagagggaaaaaaggaggtgtctgggaaataaggcttcatggaagccatctctcttatcagtgggaagaggctctggtgcagatctcaagggtcagcatagagggaacattcttaggactcagctggggctcacgcatgagtcagtctacaactgtctgcaacgctgtagttcaaaagcccaaacaccaagtatattctgccttcctggggaggagagagataagccagcccccccccccgccccccgcaccccagggaggagaaagctctcagaagaggaagcacaagaggaaaccactaactaactgctgttccagcaaacatgcatcaattcacctcagccctccctgcctctttcagtttccagcccagtctttcctctctgtctttccaagtccagaatattttcttcaaatatgtctgtatatgtgtgtgtgtgtgtgtgttagactgagaagaaaagaaagctagtcgatagtagagaaatttagagtgtggaggttagatattggcagacatattttaggtttttttgttttttgttttgtttttgttttttgttttttcgagacagggtttctctgtatagccctggctgtcctggaacttactttgtagaccaggctggcctcgaactcagaaatctgcctgcctctgcctcctgagtgctgggattaaaggtgtgcaccactatgcctggttttgtttttgtttttaaaaaaggtagaagtagtaggcagggcagtggtggcgcatgcctgtaatcccagcacctgggaggcagaggtagtcggatttctgaatttgaggccagcctggtctacagagtgagttccaggacagcctcaaccacacagagaaaccctgtcactaaaaaccaaaatacacaaacacacacacacacacacacacacacacacacacacacgagtagtagagctctcttcagtagcactcacactaaaattggaaagatacagagattagcatggcccctgcggaaggatgtcacgcaaatttgtaaggcattccatatttttatttgcctgtgctttatctaaaatcatttgtataggtgggtaattaaaagatactgaagtgaaaaaaaataggtagtaaagttctatctttatactaaagttagaccctccagaatcaggcctcccagggaaagtgacacccccccccccgtcttatttacttagatgtcccccaagactctgctcacactgacctgtctgacctttcctttttttcttcccgtgatagaaccagtcgctaccccacccaccccaggatgagcccagtgctatcctagaaccaggataagtctccaaggcaacattcaccattgagaggagggtaaggggcccgggttggggaaagtctaagcttggccaggcttccagaggaccgccccctgccgtgaagcctgggctcagcttcctgtttcccctgcatcaggcctcctggcctctggcggcctgtgtcttggagtgccctttgccaatctgtagtcctcagctcactatctccttcccgatccccctccacacacgcagagcacagtcccagcaaaccagaagactgactggataactgaaaacaaaacaaaacaaaacaaaacgcagaacccttgcatcctcaaactccctttctgcacctccgtggtcacttcgctagtgtcaagcttccctgtttgatagtggccacccttctcattaacgaagcgaggaaactgaggcacgaaaatgctgctgtgtttaggagaggtcagggaatcgaggaagcccccggacttcccttctaacaccttatccctgggatcccgagacctctgacttcagtcccggacccactcccacgatccccgtgtcccctcccctcatgtcccctccccaggtccagggcggggccggccggtgagtcagctgctccctgagctaaacaggagggaccgaggtggagcagctgggtgtggggtgcactgggcctgtggggaagccgtgttggagcgaactaaagggtctgatcggacttgggttgcgccgaagggacagccctgagtctggaggagagaatcccggaccgtgagacccgccttcccttgccccggcccctcccagttcccccagcgacggctgcttcctggtccccgacgcaaccatggctgaagaacaacctcaggtcgaactgttcgtgaaggtaagaacactttctctttctttggccactctcaggatttctgcaagtcagtcctcccctctcctgggctccagctcaaactccccaaccccttcctagttgaccccactcccagccccggtgctgttttgctgggggcagggtgggcgggcagacacgacttgtgagacggtaatgggagtgctagactcgccctgggaagtttatagaagaggtttccagcagcctaaaggggagaaaggtaaagtttcaggaatgagagagtgaatggggttcggtgcgggatccagggggatccagacaagagaaggaccgagaaagggacagtggtggggttcgagaaggtcaggagagttggctacgacgtgtggccctatgaaagaaagagaaaaatgaaagatggggcagagagaacgtggggagagagcgagaaagagggagggagagagggagaaaaagaggagaggagaggagaggagaggagaggagaggagaggagaggagaggagaggagaggagaggagaggagaggagaggagaggagaggagaggagaggagaggagagagagagagagagagagagagagagagagagagagagagaatgaataagaatctggtagggttgaaggatgagtgtgtcgcatggtggaaggaaagagccttcacgaagaagcagcacaatcagtggctgagatgactatcccccagctgaggcaggaaggagattaaagtttagcagtagttacttatgaagagaggagaggagagctccaaaggggacaggagactccttgggttagatgtaaatgccgggctgatacgtatggaagaaaaagccccctccccctgagccctcccccttcacactatcctctctgtgggtgtggtcaaggcgagctggtgctaggcttttggcttttgggttcggaaaccgctggctgccgcgctcctcctctgcccaggcctgtcccctccggcaccacccttccccatacccccgtgcacgtcccttcctctccgggcaggtcctctcccagtgagcacattcgcactcgttttttgcttctcggcctctcttggcattcctttcgttcttcccgtctgtgtgtcggtgttctgtttttctctatcttttttttctgggttttctctggctgcctttcccagtttcttggcccagggaagtgaactggagcctgggtccgccccttaggtgtggtccccacctcacactcgcctccaggggctatttttaccctgggcgaggagatgctgtagagatcctggccctttgtcctgtgacgaggatcttagaggaccagaggacatgagtgagggtttggggaactgtaggagtggcggcagctgcctaggcctctgtgtgtataggtccctgcccccacttccttgccaggaaggaagctgctgaggcctgaagacacagaaatgaatcaccctcagtctagggggaggtgtcccttgggggatgaggtcacctgcatccaattagagagttgccccctttgttaggtcctccatatctctaagttgagattaggtcctctgcctgccaggcccagcttccagaaacagcttagatagaggcttagtgaatggggaccctagtttccaaaccctgccctacctctctgctccgctgaagatctagtattcaattccaaccccaccaagtcccctattctttgccttttgaatcctgattctcaaagctagccaagacttaactgttcctctgcctcctcccaactgtcaatcactgggatgccaccagcctacctttgctgatccagaaccaaaggagaaaataattccgctctcggggtagcgtagagattgtggcagtgtatgtcagaattagcaagaggttcagagagcagcctggtaaggatggggtgcgccaagcctaatgctgagtgtgttatttttttcaggctggcagtgatggtgccaagattgggaactgccccttctcccagagactgttcatggtgctctggctcaagggagtcaccttcaacgttaccactgtggacaccaagaggtgggtccacttctgaccctctaaacatcctttgtgtggatgcacgtgcactgcatgcgcatgcgcactctcgtgaacccgtcttccttaaaccggttctctctctctcgtctgggacaaatctctccattcttatgtccctgtttctgacacacacacacacacacacacacacacacacacacacacacatcccttttcctttcttgacgtgtgacctcttctccagacggacagagactgtacagaagctctgccccggtgggcagctgccgttcttgctctatggcaccgaagtgcacacagacaccaacaagatcgaggaattcctggaggccatgctgtgccctcccaggtacagggacacttggaaagaaaaggggagctgggaggctttgcagaacaaaggtcgaagaggggagacagggaggcagggcgaagtaccccagaaaggacttcactttatccctctgccttccaggtacccaaagctggctgccctgaaccctgagtccaacacctcgggactggacatatttgcaaagttttctgcctacatcaagaactcaaacccagccctcaatgacagtgagtcttatgggtcaggggcttaggtcctgcagggttggggcatctgtgagctcggctgtcagggagatggagaggatgttttcagacccccgctgagcctccattaacctcctggctggctggctgtctcattgctaagacttttggagtttagggtttgttttggttttttgtttgtttgttttttggtttttttgagattttatttatttcttatatacatgagaagtatttgtctgtatatctctgcatcaagagcatgaagtgcctgaaggccaagagagagtattagagtccctgggattggagttacagatattggctgggaatcaaacttcaggtcctctgcaagaacagccaatgttctcaaccactgaatggtctctgcagtcccaagaccagctttttaattgggtactggcatttgaagctgagttcttatgtttatacatcacatgttgtacccacaaatcatctctcaaccgtctagagttcactcttttgttttgttttggttggttttttttggttggttggttggtttttttttcttttgtttttttgagacagggtttctctgtgtagtccaggctgtcctggaactcactctgtagaccaggctgaccttgaactcagaaacccgcctgcctctgcctcccaagtgctgggattaaaggcgtgcgccaccacatccggctcctacaattcattcttaaagtgcatcctcatgtgtgcagcccacaccaccacgtgtactgcagcattgccaggctcacagacatgagagctcttttactattttgcatacatactttgctctttggtagaactggggaatgaccgattctgggaaggtctcggcatctctctaaatctgcttccagatctatagagtggggataacttccattttctcgatttgcgtgagaagtgaatggctgagacttgtttctagactgactgggaggctgagggagaggatgtgactcagtgtacagagcttgacttgtgtgcgaaatcctaggctccatttctagcgcttgtggggataaattgcaagccggcggctggggagatggatgtcacctgtgtgcttgctactaaagtctgagtaccgagtacttgcgtttggatgctcagtggtcaaaatctttgaatgatgggcacctctgtaatcccagtgctggggaagcagaggtaggagggccctgggctcaggcgatcagctaatagagtctgattgataagctctaggttcagggagagagaccttgcctcaaaaatacagtggggactggaaagatggttcactggttaaaagctcctgccgaggactgggttttggtttccagcatccacctgacagctcacactacctgtaactccagtttctgggggtctgaacctgtttctgaccgccaccaccaccaccaccacgcctgctaggatcctacatgtacaagatgtgtgtatacttctatggcctcgcacacatacacataaataaaaatatataaataaaccttagagagagagagagagagagagagaggctggagagatggctcagcagttaagagcactgactgttcttccagaggtcctgagttcaattcccagcaactacatggtggctcacaaccatctgtaatgggatccgatgccctcttctggtgtgtctgaagacggcgacagtgtaatcatatacataaaataaataaataaatcttaaaaaaaggaaaaaaaaagaaaggaaggaaggaaggaaggaaggaaggaagatggagaaccattgaggaagacaatggatattgacctctgacccacacacacacacacacacacacacacacatgtaaacacctgcacacatatgtcacacaaacatttaataatagcattcacaatgaagttgttttgtttgtttttcttaatcaaatccagggtctcacacatgctaagcaggctctttctctctgagctatgccctcacccctccacagctcttcttgggcaggttatttaaggttctgatcagcttcctctcttgcacagacctagaaaagggactcctgaaagccctgaaggttctagacaattacctgacatcccccctcccagaagaagtggacgaaaccagcgccgaagatgagggcatctctcagaggaagtttctggacggcaatgagctcaccctggctgactgcaacctgctgccaaagcttcacatagtacaggttggtggtcaccgtggggggaaacgggatcaatctctaaagtgattttttttttttttttgagacagggcttctctgtgtagtcctagctgtcctggaactcactctgtagaccaggctggcctcgaactcagaaatccgcctgcctctgcctcccgagtgctgggattaaaggtgtgagccaccacgcccggcggtgattttttttttaatcaccttttatttattacaaagggcaaaacacaaacggggtttggaaatcaggagaaaactggggggagtcagttttctcccctccaccacgtggatcccaaagattgagccttggtcacctgacttggctgcagatgcctttactctgctgagcagtcttaccagtccagtgttgctgtccatcatgcctaggcttttacgtggatgctgagcatccgaactcaggcacgcatacttgcacagcaagcatccactttctccgaatggtttccatagattgctaccagtgatgggcccctgcccagggaccacacccttagcaattgttgcccaagtaagagaattacatcccatgacacaagccatgcttatacagcatccattaaagagtggcattcagttttactgtatgtctgtgttttatctgtgtacatgtgtgtctgtatgtgcctgtgtatctgtgtgcatatgtttgcctgtgtgtatgggtgtctgtatctgtgtgtgcctgtgtgtatgtgtgtgcctgggatgtgggggagggtgcgcctgtgtgtatgtgtgtggctatgtgtctgtgtgtatgtgtgtgcctgcctgtttgtatccagggttgcttccaagaaggcttttcctgcaactgtatcactgccaaatgtacaaatcaaacaaaggattctcccaggtctatgatgtaactcttcacatagtccaggcttcccaggttctctcaaggactcttcctgagttgctgtttcctttctgtcctggccttaaagttacagtgtaatttagtaaaacacagagccactatcactccaccatcaactgagaggcaccagacagtaagaaagctgggcagagcgtctcctctcctgcctgtaatcctcagcgtgctgcaggctgaagtagtaagttcagtgcgagttggaggccagccttagctacagaataagagcctggttcaaacaccaccactaccaccactaccccacacacacaaagaaaaagaaaaaagagaaagcagccaggcagtggtggcgcacgcctttaatcccagcactcaggaggcagaggcaggtggatttctgagtttgaggccagcctgatctacaaagtgagttacaggacagccagggctacacagagaaaccctgtcttggaaaaccaaaaaaaaaaaaaaaaaaaaaaaaaaaaaaaaaaaaaaaagaaaagaaaagaaaagaaagcaacgagaaaagaagcaaatgatgttcatttagttcttgcccacaaacagttgaaattgaattgaagagaaagcattcacatcaagggatgtgatggcttgcagagatggctcagtggttaaaagcaccggctgctcttccagaggatctgggttcaattcccagcacccacatggcagctcccaactgtctataactccagttctagagaatctgacatcctcactcaggcatacatgcagtcaaacaccaatgcacaaaatataaaacaaacaaacaattaaaaaaacccatccacatcaaggtactaaaagatgacctgaaagaagtcaagtgaaaaggagacaaagttctctacaaaaatgtttactctttgccaactctctctctctctctctctctctctctctctctgtgtgtgtgtgtgtgtgtgtgtgtgtgtgtgtgtgtgtgtttactgataatggagcccaggactaaccacaaccctagcctgtgtttgtctctgcctctgtatatattcagttttaatcacacgtgagtgcaggtgcctttggagtgcagaaggcggtggtagatcccctggaactggagctgcccactgagggcgctggaaaccaaacatctacagcaggtgttcaccactgagccatttcttagcctgtctctctctttatctgtttcttgagacagggtctttctatttagttttagtgaccatggaacttgctagtgagttctaggactgccaggtttacacagagaaaccccatcttgtgatgtgtgtgtggggggggagggggtagtgaggatggggatggaagggaaagaatcggtgagaagtctctagaggggctggctcaggggttaagagcactgactgctcttcttgaggaccatgttcagttgccagcacccacatggcacctaacagcatctgtaactcagaccagaggatctgatgcacagtcatacaaataaacaaacgcccatcctcataaaataaaaataagtctagccagcatggtggtgcacgcctttaatcccagcccttaggaggtagagatgggtgcattccagagtttgagaccagcctggtctacagagcaagttccaggacagccagggctacacagagaaaccctgtcttgaaaagcctaaataaataacatctaaaagtacaatttttaaagactctaggcacagggtacatgtctgtaataccattccagagatcatccagcctgcgtgacacagagagaccctatctcaaaagaacggcagcaaaaaagcttgtaagaatcgaagttcattggtctggcatcctggacagggctcggttttttgtttgttttgttttgttttttgtttttgttttttacctggcagaccctaaaggaagagaaagttcaacagcttcaaagcaaagcaagcatgccttccctggggctaacacactgacctctctctaacctttaggtggtgtgcaaaaagtacagaggcttcaccatcccagaggcattccgtggagtgcatcggtacttgagcaacgcttatgcccgggaagaatttgcctccacctgtccagatgatgaagagatagagctagcctatgagcaagtggccagggctctcaaatgagcactttttaaagggtccttcacccactctgtgctctccacagaggcttcggggggcttccacgttgctgcataatggacacactccgaaattgccagtgggcaggaaatccggggcacttgtggggtggggctgtgggataaggcaaaggatagtggacaagggtaagatttttattttgggatggggtgggtaggacaacgcatttcagtaataaaatacagaatggaaaaaaatctagtgttgtttttacacaaagacggcttaaagtgtagtgggctccaaatgaagagaagggtcagtgatcttttaagctcagtgtaactgctgggaatttgggaggggagtgtttgtacaggggctgccatgttttgtatctgtccataagagggctgtttcgtggtccacatcgcgattgtaaccccacagccagggctagcaggatcagggtgggcctggacactgctctgggggcggtgcctgagttcagggaaggggggcactcagccctggaggaatgggcgcggcctagcagggcggaatgggcgtggtcttagaaggtcccgccccgtcccgcttagacaatgccccggagccgccagaccatcgcgcccccgccccatcgtcgtacgtgagctctcctaccctgggaacccctcaaaagcccgagctatccgtctctccagcttgaggactcagactcccatcttcattaactctctcctctgggggtggggccaaggctgaaatcacaaggctgcaggagtggaggtggccgctggtgagtctgaagagggggctgtctccgaaacggtatggggagactggagtttgggggtgctgcatacgtccctgcaccggacggagtgtgcgaataacctgcacttgggcgaagagctgggcggggtagactttagaagatggacaggggtacggagttctgaagcctggagtggctccacgccgcgcccctcccccgtttctccgccctccagatttcgtttaagacctctcccagtcctccgggactaagtctggtttgtactgggtcgctcgaagggcagcgtgacgacccggggtggagagagaggatgcttaactccttagattctagttcctcgggtttgcgcccgtttccctttctccttcgagcatacgggacttcacaccccaggtcctgattcaccacccagttttcttttccagtcctataacctctgcgggtccctggcaggactttgggtccctcctgctgcgagcagctgagggttaagggggcggggccgccgcatttttggggagtgagcgcatcctagcggctgccaggaggggcgcggggcagggacctagcggagccccgagcaggggcaacaggtgtttgggagattaaggatccaagtcttgttcccttgggcgcctcttaaagcagatccccggtgaaaggaggctgagcggggtccacagagccagaaggtttggagggggtggggcagagtgggaggggcgcctggagatggcaggaggaagacctaggagcttttaacactcaccccttctcttctttgcatgtctttctcttctacccccacccctttctgtttcttctcttagaccagtgaagtcaagagaaaaaacaaaacagcttggctggaaggggcttcggtgtggatgtgatggggacgccgggggaggggctgggtcgttgttcccatgccctgatccggggtgtccccgagagcttggcatccggggaaggtgctggcgctggtcttccggctctggacctggctaaagctcaaagggagcatggagtactaggaggtaaactgaggcaacgactagggctgcagctgcttgaactgcctcctgaggagtcactgccgctgggaccactgcttggtgacacggctgtgatccaaggagacacggccctaatcacaaggccctggagcccagcacgtaggcctgaggtgaggacccgggtgcgggtgtgttggagaacaggattgcgcggggtggggtggaagaaggtcgaggggaggaggctggatgtctgggattggcagaaaatagggagtgaggatgtctctgcctgctctctcttctccaaggttgatggagtgcgtaaagccctccaggacttgggactccgaattgtggagatgggggatgagaatgcgacgctggacggcaccgacgtcctcttcaccggtgaggcaacggatggtcagcacctatgtgggcttggcaagggaagcagagtttgggagactaggcgatctcaggtcttgactccaaactcactctggccttcaaaccttcgcatcctcccgggattcaggccgggagtttttcgtaggcctctccaagtggaccaatcatcgaggagctgagatcgtggcagacacgttccgggtgaggaaccagagaagtttggagaatgagtgcggccaatatgccagagggcttgacctgtgctccttacgcacccctaaatcctcctgctcttctaggacttcgctgtctcaacggtaccggtctcaggctcctcgcacctgcgcggcctctgtggcatggggggacctcgcaccgtggtggctggaagcagcgaggctgcccaaaaagcagtcagggtgaggcggggcagggctatggtgaaggcgtggtcaacaaagtgggcgtggtttagggcacagaagttgcctagctctgggaattgcccacaacccttgtcttcactaagatgttcagctaatacaaagggacaccctagtaatgatggggtacagaagaaacaagagtaggggaggggttgcaaaaggcagcggtagctaaagtgcctgagacgactgtgtctgtcacagcaggcattatatacttgctgtcattatctcacaaaagtaacccttaccccaagatcttactttgtggtaggtcaggcatactcagctgtggagacctcaatgccctcttcctctctccaggcaatggcagcgctgactgatcacccctacgcctctctgaccctcccagatgatgcagctagtgactgtctctttctgcgtcctgggttgcctggtgccacacctttcctcctgcaccgcggaggtggggacctgcccaacagccaggaggtgagggagggaaaaaccgccccaccaaccagagaaagcagtctgtctttcccagtgggagaaaggaggggcccatcctcagaagcctgggtgggacccactgggaactggctagaggggggttgtggctctgttatcaaaacatccttggggtcctccctgcaggctctgcagaagctctctgatgtcaccctggtacctgtgtcctgctcagaactggagaaggctggagctggcctcagctccctctgcctggtgctcagcacacgcccccactgctgagggcctggatttggggatcccactggttaggaatagagctgtatagtgggtagaatcagctaatagaggctgggtagttgtggggagatgccccaggatagggaaggacttagtgtggaaaagaatagaagccattgggtgagtcctctctgtcaaaaccaataaaataaaattgaccttttagataagggctgtgactggtttctcgatgggacaaagggataggatggggctgaaatccaaaactggggtcggtgctagggagacagattctttagcttttttttttttttttttttttttttttggttttttgagacagggtttctctgtgtagccctggctgtcctggaactcagtttgtagaccaggctggcctcaaactcagaaatccgcctacctttgcctcccaagtgctgggattaaaggcgtgcgccaccacacccggctgattctttaacttttgttaaagacaatgtttgtgtagctgtcctggagctcactctgtataccaggctctcctcaaactcaaattcacctgtctctgtcttctgagtgctaggattaaaagcttgagccaccaccgcccagctggactctttcattttaaaaaccctctttatgggcttcctgactcacccctaccgtgccacaggactcaggtacaaagagagacaggagaccgtgtctgttgtggggaatgcaggcagggtggaaagggaattatgctgtgtgcatgggtggatcactttctgaatttacctaaatgtcaggtgactcaggctcaggattcaaagtctgcctttatttgataaagaagggatgttttccaggacgctcattcatggtccaaggctgaactcatacttcctgatattttcttataaactgacagacgtgttgtaatggggtgatttatttgctggagtctggttctataaggaaaaaccagggggtttctagagcatcaaattttgtgcagaagtaggcaagcatttgggatgaggctatctcagaaaaagctacatttgaatgaaatcctgggaggcaattatccaggtgggaagggaggaagaggaaaaaggaatccagaaaacaaaatttatttcaaagagccaacgagtattgtagggagaacattgtggagaaactctctgagggcgtgtgcacacagaaaatgatggataggcctaaaaaggggcccagtgctggagcctgaacacagagcccacgctcacagccccagagctgaaaccttgggaaagaaccagtggttgatcctgggaatcttgctggctttgagtaggaagagcagggcacgaggatcagaggggtctgtgggtcatcatgaagcaaatgatgacagtacattctggtggcagcattggacatggagaaaggtacagaggacagtgacctgctacagacaaggccttgtgtggttggtggtgcatgcttgcaatcacttttatccaaacactgaaggtagacataaggagagggagatttcaaagtcagcctcagccataagagagcctgtctttaaaaggagtggaagcggcgggttagggtcctgataagtccttgtgtgggagaggagatggtgtactctgaccccagtttctggcttggacaacttgggttcttcaagagctttcagaggaggacccaggggatggcttaagaaatgactgagtcaggtttgacaagccttgggcaaaatgcctgaggccatctggacagagtgaactaggtctgagatctggcttggaaggactactgtgtatcatttgggggctgaagattgattggccagcttcctagaagagtacggaggagaaacaaagagatgagcagaacagtgctactacaaagacaatagcaacaaagtaaaccctggtttaaacaggggtgaatgttatctggtggtaggacatcactggcaacctttcagtggatgagcagcagcagcagccaatgagcagggggagtgcagtcagaccggtaacgaggcaggtctatgtctaaagtttgaaatgcttcattgggccaggcagtgcctttaaactcagaagttgggaggcagaagcagatgaattctctgagttcaaggccagcttggtctatggtctacggagttccaagacagccaaggctatacagagaaatcccagtcttgggggggggcgcgaagaaaaagcttaacaggcagcttgatcatctttagagagggcagcagtggagaaggaaagatgttacagaagatggaagtgacagaaaaaaagttgaccattggcagaacgcaaaccaggtagtcagtcgcctctatcagtgcctctgtccatggtgcctgccccttctagctgaggttatacaggggagccccagatagaaagggttggcagaacaagggcttccctttatactacaaccgcatagacagtggaggcatcaccagaaaccactgtggacatccggcggtgcctcccgaggacagagtggtccagatcagcgtagtgcaggctctggaggaggtagagagaggacggtagtatggtctcatcaatctgaccccttagcttggaatcaaagctttttttcttttccccactgtgggtaaaggcgactatgtagcaaagcctggctttcatcttcctgcttaaacctccagagtgctgggattacactgctgctccacagcaacctagctaggctgctttcttggccctctttcctccgggattctggcctttttcccatccccaggcccttaccggctcctggtccaggtggcctgagatcttggactcctgttctaaaggcctctgtggctcagcatttatgactggagctatgtgggagggagggacagaactgaagggtgaagagaaaatgaccaactttgtctgctcctcgcaaggactcagactcaagaactcagggttagggattgtgcgggtaggatagggaaattgagtgcagttaatctcaccaaatgtgggtagtggtccaggcgggggcgggggtgggggcggaggcgagagtctgtaaggaagtccttgaagagtcaccaatctcgtcttactggttcctcggccgcaggcggcgccaataagaactgtgcaaactgcagtctccgaccagcaaaacaacttaggctcctctggaaccaggtcccgcccactctctgggctttctgacctttcagtttggtttctgcagcctcggttccctactccagcctgtagcctagcacccaagggctgacctctcacattcttttaacaaacgccaggcctccagacacttctttttctttgtaaaggttagggctctgccccacctctttccccacgccctgactggtcacaccctgtttcatgccaggctccgcctccagtgctcacctgcgccgccgccagaccacgcccgcgactcccagtcccagcacaagcccaacgcccaggagcggaatcaggaccttgggatactcgtaccctagggagaccgcgaggcagggagagatgccgtggtcaggggtacagacaatagggttctactaactttaccgctctgtaagattccgccccgctttttgtcccgcgtgtgtgtccaaattaagtgcccctgtgcatctgggcctcgacctaccgtgggtagatcctgcaggccggcaacctgccttgtcccctaacacttgaagcactgtgcgactctcattctcgtggcgtcctttgcagaaaaaggttccagaatccccggcgctcagcagcagctctagccgcttgataccattgtccagggaacgcaggcggccagagaaatgctggagcacagttggggtccctctcgtcgaggcccacaagatcggacggcgccctttagacaagcccttgcatgctgggaaactaggcgcccaagcccagcgggtggggtcggagacccctatgcaggagagattcacccggtccccagggctgccctccaaagaaactaggaaaggtgggggagggagatagttagggctagtttatcaggcgctctctctgtctctctgtctctgtctctctcccacccccccgccccgccgcgtgcgcgcgcgcgcgcgcacacacacacacacacacacacacacacaaggtgatcctagttgtctcagtctttctttgcccatcacaacttcccagggatggcctaccctcgggattcccctggacctttgagagcaacaaaggcagcagcggcaggaccaaggccatggttgggatgtggtggtcagaggcgggagtgaatcagcagggagaccggagggaagcagaggggcagggatggggatcctgccggactgggggctcagataagagcgagtgtgaggccaccaatttctggatccctctaggaatcctcaagccaacatgcagtcttcgaactttgaaatgattttaaattttgtgcttgaaaccttttgcaaaggcgctatgcttttttgcgaacaactaccatggccccaaagtaccacaaatactgaagctcagcttcctgagttcgaatcctgagttcatccagccacacagtagctgggtgatgtgagcaagccacttaatccctgcctgttccctcatcaggaaaatggagctaaaagcatgtgagaaccaaatcaatacattgagagagtctaaagcaatagatgacatatgggagtactcagtgtatgacatggtcattattatctctatcttagttcctatctcacctctgtgtgcccatgatgttcctccctacccaatgggctcctccctacccaatgggctcctccctacccaagggactcctcccaaacccaagtccaagtggggtgagggcttccttggcatgttatacagcctcagccccgcctctctgacatcacagaaaccctccatgatgccataagcccttctttatcttgtggctgagcatcagttggaagactggctggggaatggatctacattaattcacctgtttcgtcaatttctgctggaatgtctgatcaatgtcctcccatccctaggcacccaaagttgctgaaacaactcagttactgtctgtttcctgggaactagcagaaactagtgttgtggctgtctaagtcacagaggcttttctgatgctctctccagggcagggggccctcagctgggggtcctgaatccaagatccaaaatggagttgcccactagtgacactttccccctcctatctccctctcctgtctccccttcctacccaggccctcttggaccctttccacctctagtctttctctttagtcagctgggaataaattgggagggaggtgcccacagagggcacaggcccggaagggaggagccattgggattataaattctgaaaagaccgctcaactctcagagctggagacctgggaatctgctgtcaactgctggggctgtggacattctcaggaccctcaccatgaaacacctcctgttgctcaccctgtctgccctactctactgctgggtctcaggtgagtgctgaggggccccaggccccatcccaaccctatccaatacttcatatttccctctactcaggatcccaagaagtcccaaccctacatggcttagtctcgccaatgcctccaggatcagatatctctgagcatgatgggctctagttttcttactcctctccttcttttccttcctccttccatttcttgtattcttttttggggggggtgggtcagagtctcctgctttgaactcctgatcctcctgcctctaccttctaatgctgggattacacatgtgtatcacacctaggctctttggtccattatcaaggacccaggtctccattgtcattttctcctagccctgtattggcctagcctactcttcttacctggcattatggcactaggtctctatacacctttcctgcactctataacacccagatgtctgtctagccagttccaaatgcacttctccaagattagcatacctgccttcactcacctactgccctgagctgagggtcctcatagaaaggattccatgccactcctctcagagcctcagcgatggcccttcctggctcgttccctgctccttcctgagttacacacctatatccctaccggggatgcaaagccttctgggtggacccagcgactgctacagccttcccaagaatcagaaactttccctgagccttctacagagaagatgctgcagcacttaccctaaagtgagatgcgtttccgggaggctctctaggctcctctacccctgggctgaccattcctgcgccgcactttgtgtgcttacatctggagttagccaacccgggaatcctggcgtgtcatccgctgcacccaccctctccatttctgttagatgccagtgatacgtctaccaggtgttagttttcctttttccatagagcaaacgccagaagagtagagatgattcattcagtaatctccccaatctgttggcagaggtccagtccacttctaaagctagtcaccggtgactttcttgcagccgtggtttcatgccatctctgaaggctctgtggactcctttaacttctttctccctatttcaagtctcaccctggaccccaacctctgctccatccctctttccacacatctcagccatcctcagctccgggtttttgttagtacaattcttgactcatctcaggcaggcttgggtggaggaaggtatttaggtttccacatagaacaaacacctccgcccagtgcccacaccactttgcactttcgccgg

SEQ ID NO: 217 - DNA, 1159 bp, Mus musculus
ggtggagcagctgggtgtggggtgcactgggcctgtggggaagccgtgttggagcgaactaaagggtctgatcggacttgggttgcgccgaagggacagccctgagtctggaggagagaatcccggaccgtgagacccgccttcccttgccccggcccctcccagttcccccagcgacggctgcttcctggtccccgacgcaaccatggctgaagaacaacctcaggtcgaactgttcgtgaaggctggcagtgatggtgccaagattgggaactgccccttctcccagagactgttcatggtgctctggctcaagggagtcaccttcaacgttaccactgtggacaccaagagacggacagagactgtacagaagctctgccccggtgggcagctgccgttcttgctctatggcaccgaagtgcacacagacaccaacaagatcgaggaattcctggaggccatgctgtgccctcccaggtacccaaagctggctgccctgaaccctgagtccaacacctcgggactggacatatttgcaaagttttctgcctacatcaagaactcaaacccagccctcaatgacaacctagaaaagggactcctgaaagccctgaaggttctagacaattacctgacatcccccctcccagaagaagtggacgaaaccagcgccgaagatgagggcatctctcagaggaagtttctggacggcaatgagctcaccctggctgactgcaacctgctgccaaagcttcacatagtacaggtggtgtgcaaaaagtacagaggcttcaccatcccagaggcattccgtggagtgcatcggtacttgagcaacgcttatgcccgggaagaatttgcctccacctgtccagatgatgaagagatagagctagcctatgagcaagtggccagggctctcaaatgagcactttttaaagggtccttcacccactctgtgctctccacagaggcttcggggggcttccacgttgctgcataatggacacactccgaaattgccagtgggcaggaaatccggggcacttgtggggtggggctgtgggataaggcaaaggatagtggacaagggtaagatttttattttgggatggggtgggtaggacaacgcatttcagtaataaaatacagaatg

SEQ ID NO: 218 - protein, 265 aa, Mus musculus
DPPSLAPAPPSSPSDGCFLVPDATMAEEQPQVELFVKAGSDGAKIGNCPFSQRLFMVLWLKGVTFNVTTVDTKRRTETVQKLCPGGQLPFLLYGTEVHTDTNKIEEFLEAMLCPPRYPKLAALNPESNTSGLDIFAKFSAYIKNSNPALNDNLEKGLLKALKVLDNYLTSPLPEEVDETSAEDEGISQRKFLDGNELTLADCNLLPKLHIVQVVCKKYRGFTIPEAFRGVHRYLSNAYAREEFASTCPDDEEIELAYEQVARALK

SEQ ID NO: 219 - DNA, 25988 bp, Homo sapiens
ttcaggaggctgaggtaggatgaggcagaagaatcacttgaacccaagaggcggaggttgcagtgagcctaaattgtaccactgcactccagcctgggtgacacagcaagattccatctaaaaaacaaacaaacaaacaaaaaactcaagagcccaacacacatatgtaaaaaactggacggccgggcgcggtcgctcatgcctgtaatcccagcaccttgggaggctgaggcgagtggatcccctgaggtcaggagttcaagaccagcctgggcaacatggtgaaaccccgtctctactaaaaatacaaaaattagctgggcgtggtggcaggtgcctgtaatcccagttactcaggaggctgaggcaggagaatcgcttgaacccaggaggcagaggttgcattgagccgagatcgcaccattgcactccagcctgggggacaagagcgagacttcgtcacacacacacacacacacacacacacacacacacacacacacaaaactggacacaactggccaggcgcggtggctcacgcctgtaatcccagcactttgggaggccgaggtggacggatcacgaggtcaggagatcgagatcatcctggctaacacagtgaaacccgttctctactaaaaatacaaaaattagccaggcatcgtggtgggcacctgtagtcctagctactcaggaggctgaggcagcagaatggtgtgaacccaggaggcagagcttgcagtgagctgatattgcaccactgcactccagcctgggcgacagagcgagactctgtctcaaaaaaaaaaaaaaaaaaaacctggacacaacttactgagatatgaaactatatggatatttgcggagatgtccctaatataccctaaagccagagacaactgataaagactctatacaaatcaaataggcagttatgcagttacaaaactcttctctatacacaaggtctcccaaagtccctaacaggtacccaactagtagaaacattcatacaaacccagggaaggaacacagaattggtaaagtaatggctgatatgcaacaacactgtacagccacaaagtatgggaagatgctcaagcttggggggcggggggtacaaataggtaagaaatttggattggcatgaaagagatatctgacaatgggagtgaagtgggaagggaggctgggacacatctttggagccaattgcttttctggtaggtctttgtaatgtgagatgagggatggggcacacctaccaaagaggctgagcccctccttcagtccactggccactttgtacactgaggggtgagactcactcttaaaaatctgtagaacactgtcgaggagaaatggaggagtttggggtaacttggacttttgaagggaataagaattgaggactgataaatggaatggggacaggggatatcctcctgagatcacgtctttttttttttttttttttttgagatggagtctcgctctgtcgcccaggctggagtgcagtggtgcaatttcagctcactgcaacctctgcctcctggattcaagcaatcctgcctcagcctcctgagtggctgggattacaggcgcacaacacacccagctaatttttatatttttagtagagacggggttttaccatattggtcaggtctcaaactcctgacctcaggcgatccacccgccttggcctcccaaagcgcggggattacaggcatgagccaccgcgcccagccgagatcatatcttgatgtaaggtttgtcccttacttttctttgcctcagtttctccctatagaaaagaaagctagtatctttatgcttttcttcctctctttccctcaaaaccccccttccctttccttcaaggagagagatcttaatagccccaggattagggaaactagagcctcattaggattattggggcattaaacttaatccttctccctccccagagacagcagcatgcctccacctctttacctgtaagtgtcttgatctatgttcaccagatgagtcctgaggacagaaaacaaaaaagcaggaagcagtctgagttcgttccacaactccacttcctttgtccccctctctgaatattgtcccagtcttcttcccaaagtctcattagcccttagattctcccgggtgtcctagagcacttgacccactgggtcacagccacatccacaccccacccccactttacttttcaggcctcccaatcccacattactttggttggggttggggtgaatcacctacaacataaatttcttaaagcccaggatggggacgctgacattatagtcttccagttcaaccccgattcttcttcgacccaggaacttcagcagccctccaagtgctcgaacctgggaggggatcagcagtggaatcggggtaaatcttaaatctcctgggggctgcagagcaccagggaaagttactattttccagggctaggccagtacctcccagaattcagccctagcacttgtgccgcctcccagcccttatcccccaggaccaatctcactgtgaggaggcagtcaaagggaataatggaagagaggaagaggattttctcagtggcagtcatggcgtctgggatgaaggagtagtttccagaaaggaggcgttgtttgcttatctccagacctatttgagggaggcaagcaaagggaacggtcttgtagctcaattttttcaccccattttaagaatgagacaatagaagcaagagagattatttgacttgcccaagctcacacaggcagttaatggaaagctagagcaagaaccaaattttcagactcttagtctaattctctttttattctacatataatataaagatacttgtctgaaagcacagcctgagaaagataaatggctgaggaaagtagacatctgtctggaattgaggattttggtcaaaataatggtattaatagaactagtaacactaatgccttaatatctaattaggatagtacactcctgttcttattgtaaacctaggaaagttatagaagtgccttatggatcataataagggtcactgaggcagtgccttttggtttggtgataaaaggctttaacttaatggggagaattccaacaataaaaccctgtccaaaaagtgtcaccactcctcaggggaggccctcatccctagacatgacttaagcagaggcttcccaataagctgcaggttattaaagggtagggagcaggagagatcttggggggacaggtcatagggcatgaggagcacaaaggtttaggatgacataaggcagaggggagatctgtgatgatgaaggtagagttgggggaaagaatgggacaccggaacagggagttaggcaaagcaaaaggaaggagataccaaaatccacacttggcaaaaatatgatttcaggtcttttaggctctctgtgctcctgggaggctgtgggggaggaaagaaaaggctatcattctttacatctcagtccttctacctctgtctgacactccctctcacccaattctagccccctggaatattccatatattagtccttccccattttccctctatcctttaccaagtccttaccaagctttcccagaaatcgagtcatattctcatcctgtttggcactcgtaacaacagactggggattgatctcatccagaacttggaaggagaacagagatcaaatgagttaaaggatctttgtctttgactaagagaaaacccatagccctcctcttcctacccctctccttctcaaaaacatttcctccctaggagtagggagtgctctgcacagtgggaacacaggtagaagttgagatttagaaaagtagttaagagtggtgggatggtgagagggaagtgggatgttctggatgttgtcactaggctgtaaacccctggagaacagacatgactgatttgcccagggctgaatctgaagcacctgaaacattgtaaatacgtcatatatatttgtggccaggcacagtggctcatgcctataatccctgccctttgggaggccaaggcaggcagatcactggaggccaggagctcaagacaagcctagccaacgtggtgaaaccctgcctctactaaaaatataaaaattagccaggcgtgatggcagattcttgtaatcccagctactcgggagactgaggcaggagaattgcttgaatccgggagacggaggttgcagtgagccaagatggcaccactacacttccagcctgagtgacggagcaagacactgtctcaaaaaagaacaaccaaacaaaccaaaaaacaacctcacaaatatttgttaaataatgaaatgaattcataaaaacaaaagagggagcctctgtgaagcaactgtaaaatatattgagtcagtgctatagtttggatgtgatttgtccctgccaaatatcgtgttgaaatttaatccccagtgtgatagtgttgtgaggtagggcctagcaggaggtgtgtgggtgatgggagtggatcgctcatgaacagattaatgcccttcctggagtgtgttggtgggtatgagtgagaggttctcactctattagttcctgagagagctggttgtcaaaaagagcctggcatctccctcccccttgcttcttctctgccatgtgacctctacacaccctgccttcccttcttccatgagttgaagcagtctgaggctctcaccagtgaagatgcccaattttgagctttccaaccatccagaaccataagccaaataaaacttttttttttttttaacaaattactcagagtcaggtatttccttacagcaacacaaaatatgctagacagtgaggtgagttaatgtaagtaaaacatggctgggcgtggtgactcacacctgtagtcccagcactttaggaggccaaggtgggcggatcacaaggtcaggagtttgagaccaccctggccaacatggtgaaacaccatctgtgctaaaaacacacacaaaaaactagctgggtgtggtggcacacgcctgtagtcccagctactcgggaggttgagtcaggagaattgcttgaacccaggaggtggaggctgcagtgagccaagattgcgccactgcacttgagcctgggtaacagagcaagactctgtctagaaaaaaaaaatatgtgtgtgtgtgtgtgtgtgtgtgtgtgtgtgtgtgtgtgtgtaacacatctgcaatcccagagagcagaggaattcatggttccatccccacctctctggagaagcttgaggctctcgtggtctggggcatctggcatgaagtggatagtggagtcactagtatcatagtaggcaatgcccaagtatcctgaattccacagcacacacagatggatctgtccagcaaggaagaaaggaaatcactattagaatcactcataagtgtagggtttaccatgtcttatataatttaatcattttctcaaatctctgagataggcatcatcacccccatttagtgaatgtgaaacagccactcaggaggtaagagacttgcccagctcttcccaaccctgttttttttttctttctttctttgagacggagtcttgctctgtcgcccaggctgaagtgcagtggagcaatctcagctcattgcaacctccgcctcccgagttacagtgattctcctgcctcagccttcccagtagctgggataacaggcacgtgccaccacgctcggctaatttttatatttttagtagagacggggtttcgccatgttgcccaggctggtctccaactcctgagctcaggtgatccgcccgcctcagtctcccaaagtgctaagattacaggtgtgagccaccgcgcccggctcccaaccctcttttattctaacttcccatcaactctccattcaagtttctactcccctcagagacctcggccagctcctcctcctcctcgacttcctcctcctcggcctccctggggcccggcactggggccgggctggggaagccggaggaggccgccccaggtctcggtccctgcggtgtcctccttgggttcgctcctaaggaggccatgagcttggaggctctgcggatgcaaaaagtgagggcggttcggaagcaacgattcacagaggaggccggggtagggtggcgcgcagaatgcaaagcactaagtacttctgctacagggctgcggggcagggctgaggggcgtggagagctgtggacacaggaggtgaattctcgggtatttaactaaagtacagattgtgggaaactccacgcgccccaccctcattcctgtcacgcggaggttaccctttggaaggaaggggtctgagggccctgtggggcgagtcgtgcacgtcttatgtctctgcctctgccaaccacgcgccaggaccccagcctcacgcgcttatcttcctcctcccccagctgccgccatcgcagcgttttcccgccttttcagtaacctgagtcgctacaggtgggagaacgccccgctgaccgaccgccacgagcctgcaaaaggagcgcgccggcgcgtgagcgaggtgcgcgcgcacgcgccccgccctcctagccgctgttgattggagaggcccggatccagcctagagatccgacagggcgaggaggagaagcggactgccgtagctgaagagtctggacgctgattggcctatttgccttcggggcgggtccagaacgttcaaacttcccgccctctgccgttgcttagcagccgggcctctagcactcactgtttctgggatttgattggcgcagtgggaagcccgcgagaaggtcggaccagggtccgtagtcccagtccctggaaggggtttgggaccgttgcgggggttttgagggggaggccaaacttaaagagccagaggcgcttattttttttcctgcaacaactcttaagttaatatttgtaccctctgagttaatatttatacagagcttagaacagtgcctggcaaacaaagtaagacctaaatgagcggtgtttcaaataaataagcggaaacaagcaggacttctgtctcagccctaccgtgcctgtttcctgggtacagggtatgaccacccccataatggcacgacagggcctaatttattatttaaacccttcaagcagaggtggaagcattcgaattacatcaaattctggcagagagaagtagttctgatcagaacactcacacccctactgggacatgcccataccccttcgcacttctacacacccctgaagacagagaggtatctatcattcatgcattcggcaactatttagtgcctattttgggccaggggttggactcaaagcggtgaacataatgaagtcactgctccataaagcttatttgtgtgtgtgtgtgtgtgtgtgtgtgtgtgtgtgttgcgggggtggggttatgagggagaaagaaaaaaaatatatatatatatatatataatccctttaaatgcaccatcctccccagctttgttcctagtaccctgagatggggagattcctccccagccccccaacccaagaagttaggaaagatggtgggggtgagatgacctagctgtgctaaccagtaattggaaaatcccctccagcaagaaaggtgggggaacagagttaagggctgggttaatggttacccctggcaaatctgttgagcaatggagctatagaaacttggaggaggttggtgacagctctggggagtgtcagggagggacccaccttccaatctggggtgtgaagagattagggactagtttaccaagcccaggaaggggagggagtggaaagagaagcccagagagggaaagaggagctactgagataggagaaatgcagggacagggaggtgagatggagggaaacctctgttgcaggatttgggggtacagccctggctctgctggatggttccaggagagggcagcgttgcctgtcacctggtaaattaaggcacgataccctgtgggtagtcatgccagccagccaaagtcaatattgatatcaaggcagctgtagctataaagctgtaggagagaaaagagaggccgggagaggctgccaaacctgtttgatcttcaagctggccccatttacctaaggcttctcttggacacagaccagttggaacaggagaggaccctgagaagtagagttgttttgatcccctcccctcaatgggaaggggtcctgtgtgcagattttgagggtcaccatgagggaattcacacccacacagaggcatggaatcatacccttacaggatgttacagttcaagggaacgaacaccaaagatagcctttctgtcgggaggagagaaaaaggccctcccacaagcaggagaaaacccacagaagaggaagcacaagaggaaaccaccaactgctggtttccagcagcacatcacgtcactccaccccactcctcccccaagtctctccctttctttaagtttcaagctctgttttagttctgtgttcttgcactccaccatggttttctggaactgtaggtcttttgttggacagagggtgatgaggaggatagagaagggatggttggacaggagagaaattcaggatatggaggctggaattctgggtttattttttcagcaggtcataaaggtttaatagaaatcaaggttactggagagagagctgctcctcctatgtcctccctgcttatttatttaggtgtccccaaggactctactcccactattctgtctgatctttctttatccccatgacaggaccagctaacaacacccctaccccaccccctatacacatacttcaggatcgggccatgataatcccacccctctgccccatctccaaggcaacctgtcagtgagacgaggacaaagggcacaggaaggggccccaataggaaacataagtggaagcacaaagctgaccaagctacaggaacagacccctccctgcaacaaagccccttgcctcggctttatgtttccttcgcaaaagacttcgtcatctcccttcccatccctaactctactttctttttcttttcttcttcttcttttttttttttttttttgagatggagtttcgctcttattgcccaggctggagtgcaatggcaccatctcagctcactgcaaccttcacctcccgggttcaattgattctcctgcctcagcctcccaagtagctgggattacaggtgcccaccaccccgcctggcaaatttttgtatttttagtagagacagggtttcaccatgttggccagtctggtcttgactccctgacctcaggtgatccaccccccttggcctcctaaagtgttgggattacaggcgtgagccacctcacccggcccctaactctatttcctatgcccaatcccaagtgtaggccacaaggactgcaagtcctagtgctgagctgggcccggagacagtagactgcggggggcacaggacctactgagacaccagtctgggcagctcagggagtgctggcgtcaccccttccctaatcccaggctgcatggctaacggttcctatctgcagtcccagccttccacttccgagttcttctctcagaccacagtcccagcaacccagaatttggattggagtctggaagaaatgcagaatgattaaacgaccacctttccatttgaagtccccatccctgaatcttcacgggtgtgcccaagctgttagtgtcaagttttttatatgagggtcagtcgggttgtactcagattaatgaagcagggaaactgaggcagaaaagagtcctgtgttcaggagaggtcggagaaacaaggaggttttcaggactcctccttaacacccccatccccatcctgtgggagatccgaggattccccttccggactcactccctacatcgtcgagtcccgcccccctccagtcccctccccaggttcagggcggggccggtcggtgagtcagcggctctctgatccagcccgggagaggaccgagctggaggagctgggtgtggggtgcgttgggctggtggggaggcctagtttgggtgcaagtaggtctgattgagcttgtgttgtgctgaagggacagccctgggtctaggggagagagtccctgagtgtgagacccgccttccccggtcccagcccctcccagttcccccagggacggccacttcctggtccccgacgcaaccatggctgaagaacaaccgcaggtcgaattgttcgtgaaggtaagaacacttctctcctcagccacccaaattcctggaagccaactctcacctttcccccggtccagccttaactccccaatcccttccctccttgactcccacccccaatcccacgtgcactctttggttgaggggtggttttgagaggggaagacattaacttgttagcaagtaatgagaattctaggatcaaccctgaaaagtttgtaaaagtgcaagtttctagcagactaaaggaagggaagtggagaaaaaggagaattcccaaaagtgagactggggtggggttagagggcgagctggtgaagggacagtgggggcccagcagggtttagaagggacagaggggaacctcagttaggacatgtgtccctacaagatctgagggtgagtagtgcagtaggagaggtgtgtgtgtgtgtgtgtgtgtgtgtgtgtgtgtgtgtgtgtgtgtggatggagacgcttcagggaagacggtgtgttgagggaggcctgagagtgagagcaagtaaattgggaagctttggaggggcggaacaaaacaggagactgggatcggagtttgaaaagcagagctggagaggtgatcgggtggcattgaatatccccaggactggggaaagggacagaaggggaggtggcaagaagacgtgagtttaacgtagctaccacaaggatgggtgggagagagatcagacggaggagaagagctcggttagggcattttgggatttgggggttggagaagtagaagacttgccccaactctctcctctctctgcgggtgtgggtaaggagagatggtcctatggcatttgggtagcaaaactgcaggcagcaggcttctcggtgtcacccagcccccctctgattgcagcggccgctcccctccctaccgctgctgcattcatttcccagtcttgggacctcctggctgtgcccctccctcccttccttaacagtgtcctcttctccccgctccgtttgtgtctctccgttggcacgcacgtctccccactctccactttcctgccgcctttctttccccttccccccttttgtttctctcatctttgtgtgtctctgcctgtgtctccctctcccttctgcttgggtttctcgggcagccattccctctccctgggcccagggaagtcggagcctgcttgggtccgcccccttaggtgtggtccccacctcactctcacattcgcctccggggctatttttactcgtgggtgaggctgtgccgcagagattccggccctgtgtcctgtgagaggatggttattgcagtcagaggacttgtgctgggagaccctggcagcaggttaggggtagccttagctgcccaggcctcatcctcactgtcccttcccccacatccttgacaggaaggaagccggagacagagagatgaatcaccctcagcttagggggaggtgtcccttgggccaatgaggtcaccacttgctaattagagggcagcccctctctgtagggccctccacatctctagcgcgaggcccagggccccttgactagactccccacccaaagacaccttggattggaggtgtagagaaccaaaactctggctcccaaaccccacccacctctcctgtcttcagactctactcccttcaggaacccagaaatccaggcttctagcctacaactctggcctcactgaagttccacacccttccctctctaggattcagatcctcccaagttctccaggacctcctccctctacctacctcccacctgtcctcagtgtctggggaaccagaagcctgcctttgcaaaacagtttcccattgatctgccttaggtttgacccaggcccaagggcaaagagcccatagtgaggggacagtgtatgtgtcatgactaggcagaaaacagctggtctgggagtgggaatgcagggactggcctagggatgggtggggtgcatcaggcataaccttgggttggggttacttttcaggctggcagtgatggggccaagattgggaactgcccattctcccagagactgttcatggtactgtggctcaagggagtcaccttcaatgttaccaccgttgacaccaaaaggtaggcctgcttatgttccttgaaacacccctggtgtacacatgtgtgcaaacacacacccacccgagtccttctgtcatgaacatttttgccctccccctggagtccctttcttatcccacgtcctccattccccctttctggttcttcctgacccccatttccagtcctgattcctgatcctttctccaggcggaccgagacagtgcagaagctgtgcccaggggggcagctcccattcctgctgtatggcactgaagtgcacacagacaccaacaagattgaggaatttctggaggcagtgctgtgccctcccaggtataggggcactcagaaagtggagaggtggagcagggagattctgggaaacagacagtttgcagaaatggaaaacagagatggtggtggggctggggcaggagagctagctgaggttcctcccaggaagacatcttacctcatttttcccattggctttcaggtaccccaagctggcagctctgaaccctgagtccaacacagctgggctggacatatttgccaaattttctgcctacatcaagaattcaaacccagcactcaatgacagtgagtcttgtgggtcagaggcctgggtcctgggaggaatagagaggacccagcgggtaggagacattaggggcacctggacgttcagatatcagggagatgaagcagatgttcgtaaatttcccccagcttcccatttttgctttacctctatatttccctgcattttcattggccaagacttttaagcttttctcatttgttccctagcctcttctgccccactgaggacgttagttggctgctggcctgttttctggcagaatagggtcatgcttaagaacagtcatcactctagatccagactacctgagtacaaatccaactagccgtataattttgagcaatcatttcacctctctgtaagtccatttccagatccacaaaattaggatgacaatacctatttcatgggttgatataaatttttttttttctttttttttgagatggagtctcgttctgtcgcccaggctggagtgcagtggtgcaatcagctcactgcaacctctgcctgccgggttcaagcaattctcctgcctcagcctcctgagtagctgggattacagacgtgcatcaccacgcccagctaatttttgtatttttagtagagacagggtttcaccatgttggccaggctggtcttgaactcccgacctcaggtgatccacctgcctcggcctcccaaagtgctgggattacaggagtgagccactgcacccggcgatataaatgagtttgtaaaatgtaaagtgttcactttgggaggccgaggctagcgcaccacctgaggttaggagttggagaccagcctggccaacatgactggtctctactgaaaaaaatacaaaaattagccagttgtggtggcaggcacctgtaatcccagctactcaggaggctgaggcaggagaatcatttgaatctaggaggcagaggttgcagtgagccgggatcatgccactgcactccagcctgggcaacggagcaagactccgtctaacataaaataaaatgtaaagtgcttagaataacacatagaaaagtaactacatgagtgttagctattattattttggactcaccattagtatccacccccaacgggccttttcggactatgtcaatcttttcctgaagttctaatcagttccctctcttgcacagatctggagaagggactcctgaaagccctgaaggttttagacaattacttaacatcccccctcccagaagaagtggatgaaaccagtgctgaagatgaaggtgtctctcagaggaagtttttggatggcaacgagctcaccctggctgactgcaacctgttgccaaagttacacatagtacaggtgtgtggttattgcgggaggagaggatgaccactggagtggccctttaaggagctcccacatgggcttcccctgacaaccactctaaagacgatttctttcttagggtggttttcataaattgctaccaatggcagaccccaccccagtcctttgcagcagtcattgctaacaagaccactgcttgagataattatattccatgatgtaagtcatgggtgcaaacagactagcaaagaggaatacatcccagtattacttttgaagaatgctcttcctgtctcggtatcactgccaaattcccagattagacagagcaggcttttcctaaagtcaaagctttaactttctttataacttcagtcttcacttcctcttgtggaagatcaaaactgctggttcccatgtttttgtcatagtctcaaagctatggtttagtttgtgcaacatgggcctgacatcagtctgccacacaactatgtagtgaacatctgtgtactaagcattgaaagatacacaagtgtatggtgactgggccttgctctcaaagggttgaaatctgagacaataaaatattcacatgaaagttaagaatatatgatgaaaagtcagatgggccgggcgtggtggctcacgcctataatcccaacactttgggcggccaaggctggtggaccacctgaggttaggagttcgagaccagcctggccaacatggtgaaaccccatctctactaaaattacaaaaattagccgcacatggtggtgggcacctgtaatcacagctatttgggaggctgaggcaggagaatcacttgaacccgggaggcggaggttgcagtgagccaagatcgcgccattgcactccagcctgggtgacagcaagactccatctcaaaaaaaaaaaagtctgatgaaaaatatagagacaaaagtcacctgtgtcagtgcctgaagtggtatagggggaaaaagtcactgtggaaattcaagaggagaattttataagtaaattatatctcaagttttaaaaactcaggaaaaatggctggttattaaaagccaggatttcagtaagtgagaaggaaggctaacgacagtacaagacagtgaggagttgagctggttttatcatgtcggcctggggagaagggaaagccaaggtggcttccctgggtctaacatgttggtccctctcctctccccatcctcaggtggtgtgtaagaagtaccggggattcaccatccccgaggccttccggggagtgcatcggtacttgagcaatgcctacgcccgggaagaattcgcttccacctgtccagatgatgaggagatcgagctcgcctatgagcaagtggcaaaggccctcaaataagcccctcctgggactccctcaaccccctccattttctccacaaaggccctggtggtttccacattgctacccaatggacacactccaaaatggccagtgggcagggaatcctggagcacttgttccgggatggtgtggtggaagaggggatgagggaaagaaatggggggcctgggtcagatttttattgtggggtgggatgagtaggacaacatatttcagtaataaaatacagaataaaaatcaagtgtttttacgcaatgggggtttaaagtgtgggcgacatggaatgaggggtgggtcagtgatcttgagctcagggcagaagccaggaattaagaagggaaatgtttgtggtggggctgctatgtttcgtgccggtccgccggtccgccgttgcgctgttctgaggtctacgaagcgtttgcagccccgtcgccagggccggccagatctgggtgggcctgggcagcgctcgctgggcggtgccgatttctggcaaggggggcgcagtctggatgtaatgggcgcggcttagcagggcggaatgggcgtggcccgaagaagccccgccccgtcccgcttagacaatgccccggagccgccagaccgtcgcgcccctgccccatcgtagtatatgagctcgcctacacaaggacccccgctaaaagccagagctcccagtccccgaggcttgaagacggggactcccttctccaccaactctgtcctcggggggtggggccccagccgagatcacagcgcgacaggagtgggggtggccgctggaggtgagtcttgcgtggggggccctgaaccgtgtgggggccggagtttgggggtgccgggcccatgcctgcaccagacagagagtatggggagccggtatttgggcgcggagctaggcggggtggactttgggacatagacggggaaccgggtcctggagccgggagtagtgccagcgccccggaaccacgccccctgttaccccgcccctcgcatttcgttttagacctctcccagtccttcgggactcggtctggtttatactaggtcgtgctaggggcagcgtgaccagccagggcggagagaggatgcttaactccttaggctcgaactcctcccttcctacccacctctctcccttctcgttcgggtattcaggacttccattccccagcccctgcctctccagctttctccttctgtcccataacccctgcgggtcccgggctggacttccagtccctgcggtagcgagcagctgagggttaagggggcggggctgctgcatttttggggagtgagcgcatcctagtggctgccaagaggggcgcccgacagggacctcacaagcccccaagcaggggcaacaggtgttttggagattagagaccctagccttgttcctcaggctcctcttaaagaatctgacccctgagggtgctgggtagagtgaggtcgacaggagcggaaggtctggagtgggtggggcggagtgggagggacgcctagagatggcaggaggaagacctgggcgctcttaaccacccccaacgcccttgtctgcatgtctttttctctgtctcctccttttctgtttcttctcccagacaggtgaagaaacaagaaaactaagaaatccgagcggttggagggggagtctgtgtggatgggatggggacgccgggggaggggctgggccgctgctcccatgccctgatccggggagtcccagagagcctggcgtcgggggaaggtgcgggggctggccttcccgctctggatctggccaaagctcaaagggagcacggggtgctgggaggtaaactgaggcaacgactggggctacagctgctagaactgccacctgaggagtcattgccgctgggaccgctgcttggcgacacggccgtgatccaaggggacacggccctaatcacgcggccctggagccccgctcgtaggccagaggtgagcgccgtggcgcgggtgtggtatggggaaaggcagaaggaactggatgtcggggctttggggaagaattgaggatgggggtgtcacagctccgtgccctcttctcctatcctaaggtcgatggagtccgcaaagccctgcaagacctggggctccgaattgtggaaataggagacgagaacgcgacgctggatggcactgacgttctcttcaccggtgaggctggggggaggcataggtcttggcacagggaagtagagtttgggagactcggccgtctggagccttgtttctaactcactcccgccctcaaacctccgcggcctcccggactcaggccgggagtttttcgtaggcctctccaaatggaccaatcaccgaggagctgagatcgtggcggacacgttccgggtgcggagcgggaccagcctagggagggagggggtgcaggtgggggtcggaagggcctgggcgcccgctgaggaaatgagaggcagagagcagcctatgtttgaagataccccatcacccctcccgcgcccctgaatacctcccttcgctctccctaggacttcgccgtctccactgtgccagtctcgggtccctcccacctgcgcggtctctgcggcatggggggacctcgcactgttgtggcaggcagcagcgacgctgcccaaaaggctgtccgggtgaggagggggcggggccaacgaaagtgggcgcagttctgggcccgggaggccgggagctgggaggcttaggaaattagccctaacccctgccctcaatgggctgtccatcttacatgaaagaacacaggagaaaataagaagttacaacagcaggactgggaacaggggtgattaatttgctcttccggagtttcaggaaaccccaaaggtggcacctaaactgtgactctaaggatgggtaggacagataggaggggctggggaaggtagggggttgaaaataactgcatgtgattccaaggtggaaattagcaaaggtaactaaagtacttagtgtctgacatatcgtaagctctatgtgcttgctgtcattattttccacaaatgtcagtccgtccccagcccttagtggtggttgagcaggcagacacagctgtggagaggttctgagactcgaacacttcctctttcctctaggcaatggcagtgctgacagatcacccatatgcctccctgaccctcccagatgacgcagctgctgactgtctctttcttcgtcctgggttgcctggtgtgccccctttcctcctgcaccgtggaggtggggatctgcccaacagccaggaggtgagagagggcaggaactccaacaccaagcaccatcagagaaaagagtttcaggctttcctagtgggaggaaggaagggtaccttctctagaagcctgggtggggccactctgagctggctggaagagtggcctggctcagcctgaggtctcactcccctctccccactccatgtcttccctgtgcaggcactgcagaagctctctgatgtcaccctggtacctgtgtcctgctcagaactggagaaggctggcgccgggctcagctccctctgcttggtgctcagcacacgcccccacagctgagggcctggccttggggtactgctggccaggggtaggatagtataggaagtagaaggggaaggagggttagatagagaatgctgaataggcagtagttgggagagagcctcaatattgggggaggggagagtgtagggaaaaggatccactgggtgaatcctccctctcagaaccaataaaatagaattgaccttttagactgggctgtgactggtgtcttactggggcaaagggatagggcagggctgaaacctgagtttggggtcagtgcagggaagaaggcctcttattcaaaaatcttgttaggtacttatcaactcattgcccaaccatgtcataggtacttgagcacaagatgaacaagacagaatttctatcatgggaagtgtgtccagggcagagaaaagagtgtatgggtggattgctcactgaatttatctaaatgttagatgattcagagactggtagattaccagtccacccctatttgataaagaaaaagaaatgacacttccagggacattcattttcattcattcatttaatgaggcttagcaatgatatcaaaagggtcagtctcctgacgttggggagctcacagtacatgcaaatttcttacaaattgaaatacaggttgtcatggaacaatttacagaaggctgtttctatgagggaaataaagggggtgtgccctagggcatcaaagtatatgcaaggggtggccaaggagggtcaccttcccagaaaaggccatacttgaactaaggataaataagaattagccaggcagatagtgtgaaggagggaaaggggtaatacaggaagaaggaattgcactgggcaaagacattttggggctagggagaattctctaaggctggcattttctaagatgtgcatgtggaatgacacaggtaagcctggagagtggacaaagtgctgtagtaccttgtatccaaagccaaggcacgtgggcacagagctgaagctaaggagagtacttcagttctgtaataagggctgtcaggagcagttatctcttgagtaggatctctctgacttcagggaggaaagcaagggtaggaggatgaggtggggctatgggtaatccaggaaggaagtgagcagagtacattcacgtggcagcgctgggcatggaatacagtgtgggtttgacagtgatgttaagatagaaagactggacttcatggctcattgtgtgggagtaagagagaaaggaggtctgcgtgactcccagtttctgggttgggcaactgggttgttaaagagaatacagaggagaattaagtgagcagcttcagagatgacaatgagttgggtttgacattcagagtgcgaaatgcctgaggtcagtcaggcagaatgtctaagtggaagtttgttaatcccaaatctgagatctgagccagagagagttctgagtgtcatttgcagaggagggggctgaggactgactgttgatgagagtgtcccagaagaagagaaagggacaaacctagaatggtgggaaatactgtagggatatggagcaaggaagaggagtccaaaaagaaaacaccagcaacaaagaaaaacagcttaaagaatcaggccgggcgcggtggctcacacctgtaatcctagcactttgggaggccggggcgggtggatcacgaggttagcagatcaagaccatcctggctaacacagtgaaaccccgtctctactaaaaatacaaaaaattagctgggcgtggtggcgggcgcctgtagtcccagctactcaggagcctgaggcaggagaatggtgtgaacccggcaggcggagcttgcagtgagggagatggtgtcactgcactccagcctgggcaacagagcgagactccgtctcaaaaaaaaaaaaaaaaggagctagggcttgattgggtatagagaggacactggtggtgagggagacatggaggttataggagagatgggagtaagtttagaagtaagaccagtggcagagacagcctggaacccaggtctcccaactcccagtctagcacttatttctataccatggtgccttcctcttccaggtgaggaaccaaggaggggagagggattatggggagctgggatcccctagcttgggaggtttggagtaagggcttcccttcaaactacaactgcatagatggtggaggcatcagcagggtccgctgtggacagccggcggggcctgctgagggctagatggtccagatccgcatagagcaggctctggaggaggaaggggaggaagacaagatggtctccacagtcttccttggggttcaggcctttttttttttggtccattttcctcagagattctggctatccccttcccatccccatgcccttaccggttcctggtccaggtcccctggaatcttgggctcttcctcctttactggcctctggggctcggttttcacaagtggagctatgtgggggggacagagctgaaggatggagagaaggtgaccaacgtgtctgctcccagcaagggctcagactcaggaattgaggggtggggagtgggcatgtaggagaaagaaaatggggtggaattagtctcaccaaatctagggagtggtcgaatcggttgcgggggcaggcgcctgtaagggacatatgagtctttgagaaccaccagtcttgtctcactggttctcctgggactcgccacgccaaggacagcccagcaacttgaaggctcagaccggaaacaacttagactctaccccaccgacagtccagcccaggctctaactctgctgcacttccagctcatctgctctggtggggctctactcaccagccagcggcctcgctcccacctttgacctctcccattcttcgccaagccaggaccagagctctaggtctagctctttcttttgcgaaggttctggtcctgccccttccacctctggtcactccccatttaacgaggccgggtccctcctgctcacctgtgcagccaccagaccaggcccaaagctcccagtccgagcaccaacccagcgcccagcagcgggatcaggagctggggatacacggaccctgggggaaaggcgtggcggggagggatgctgaggtcaggggtttgacgagggacagccagcagtcccgctcaagaacccccagccaaggccctcttccctcctccgggtatgtgtcggagttaagtacccttgtgcgcacaggcctgcacctaccatgggtaggcccgggggccttgcaataggtcctgtcccccagcacgtgaagcactgtacggctctcgtcctcgtggcggcccttgcagaaaaaagtgcccgagtcccccgcgctcaagaggagctccagccgccggataccagagtccagggagcgtaggcggccgacgaaaggctggaggggaggcacggtgggggtcccgctcgaagaggcccacaggatcggtcggcgtcctttggacaggcccttgcaggccgggaagctgggtgcccagacccagcggatgggatgagagactcctccgcaggagagattcacccggtccccagggcggccgtccagagaagctaggagaggccggaggctgtggttagggcacgtccacagggcaagacgaccctccatcccgtctcctctttctcttctctgttctgcactccagccatcctggatcttcccacacacaacccaccctactaggcggcccttatcttgcttcagcccctctgcgtctatcacaactctcccagggatcgcttacccccagggttcccttgggccctcgagagcagcagcggtagcagctgcagaaacacagccatggttaggatgtggtgaggagaagctgcgagcgaatcagcggcgtggggccggttggggggggaccggagggaagttaggcgtggggagaacggaggggctggggggctccgataagagagggggcggggccaccagctgcccagatccctttgggaatcctcgcaggcaaactcggagtcttcaaatggttctcacttaaaatgtgtgctcgggccatttacacaaatgctttggcctgcttaacttttcaggtgcgcctgtaatcccagctacttaggaggctgaggagggaggatcgcttgagctcaggaggtcgaggttgcagtgaactgtgatcaggccattgcactccagcctgggcgacagagccagccagaccctgtctcaaaaacaacaacaacaaaaactcctgttttgtaggggattgtgataacgaaataaagtaatacatgtaaactgcttagaatacataggatcactatgtaagtgcttgccattattattactatttctattcttttttttttttttttttttgagtcagagtcttgctctgtggccaggctggagtgcaatctcgactcactgcagcctccggctcctggattcaagtgagtctcctgtctcagcctcctgagtagctggaactacaggtgcatgccaccacacctaatttttgtattttcagtagagatggggtttcaccatgttggccaggatggtctcgatctcttgaccttgtgatccacccacctcggcctcccaaagtgctgagattacaggtgtgagccaccacacccggcctactatttctattcttattttagcttctacctcacctctctgtgcccatgctgttcctcctggcttggtaccctgcccaagttggcaggttttgactggggaggtgctttggagcaggtgcacacagccacacctaggacaattgctgctgctggactggagcaacaaggccacaccaagcgcaagtggagcacgggtgacatcctgagaaccttcatgggagcctgaggcagccctacttagcagacctgtggtggctctcctggatgagtagccccagcccctgcctctgctgctgtggcatcacagaagccatcagtgagtcacttattgctgagcaggcattggaaagaccgagtgggggctgaatggagattaatttgacccattcctcccccaatttccaccagcatgcccctatcaatgcccagcagggacccagggacccaaattcagcaattaatttgggccacatccttttgtccattttccaggaaccagcagaagctgccaccatggacactgtaaatcacagaggcctttgatgatgctcattcagaggactgagcagcaggactcttagctggggaccaggaagggcatcttggcctgaaaccaagaaccacaatggcattggccactagtggcacctgccttcccccatccctctctcccatccctactccccactcagtcctgctcagtgccttcccaccccttgtcttttctctggtcagctgcgtagtaagtgagaagggaggggctaccagaggcagggaagggaggagcctttgggtttataaattccaaaaaggccactcaactcctagagctggatccttgaaaatctactctatcagctgctgtggttgccaccattctcaggaccctcgccatgaaagcccttatgctgctcaccctgtctgttctgctctgctgggtctcaggtgagcacctgggggccccaaagacctggtttgcctggtcaggacctttacaccctgctctacccacttcccggccctacccaccactcgggatcccaacacccccagccccaactggctcagctctcctgtgccaccaagaccaggcttccctatgacagcctccttgctctatttctcaaaaagccaggtctccatccatcctccccacctccaagaaagacccatttctctcacctgccagggctctgggtcccctgttccccactccaaggtgtctcctccttggaaactctggtatccagttccccaaccagccccacttcaatatgcaactctccagagtctagcttacctgccttctcctctatctgctgtgctcagtaaggtgtcctctcgaagacctaggcatccagccccaggctccttttgtaacctaccctccccatctactccatcagggactcacatgttcagtctctcagccatggcctttcctagataccccctactcccctcctgggttgcatacctcctcccatacaggggatacaaactttctagatggttgcagtgacatctaagagcctccatggaaacagagcgttttcttgagccttctgaagaggggacaactgggccacttacctccagggtgaagtggatttcactgaggtacacttaccaggctcttccaccctcggaccctgcgtcaccaaatcttgcctgcccaaaccttgaattaactgaagcaggaaacttggggtgccaccttctgtatccaccctctccattttgataaggtgctaagatggaatctggtgatctgtctctcaggtatcattcctttctgctgaagagctactggggtgagaggattctattcaggtctggttcctcttgccacactcttgccagctccaggaggtgaagagtaaattgtaaattgctaaagctggccacagatggctttctcgccagcctcaagttccaaggcatttctgacagtgttgtaaccctcatgattttcatttttattatttctccttct

SEQ ID NO: 220 - DNA, 1250 bp, Homo sapiens
gttcagggcggggccggtcggtgagtcagcggctctctgatccagcccgggagaggaccgagctggaggagctgggtgtggggtgcgttgggctggtggggaggcctagtttgggtgcaagtaggtctgattgagcttgtgttgtgctgaagggacagccctgggtctaggggagagagtccctgagtgtgagacccgccttccccggtcccagcccctcccagttcccccagggacggccacttcctggtccccgacgcaaccatggctgaagaacaaccgcaggtcgaattgttcgtgaaggctggcagtgatggggccaagattgggaactgcccattctcccagagactgttcatggtactgtggctcaagggagtcaccttcaatgttaccaccgttgacaccaaaaggcggaccgagacagtgcagaagctgtgcccaggggggcagctcccattcctgctgtatggcactgaagtgcacacagacaccaacaagattgaggaatttctggaggcagtgctgtgccctcccaggtaccccaagctggcagctctgaaccctgagtccaacacagctgggctggacatatttgccaaattttctgcctacatcaagaattcaaacccagcactcaatgacaatctggagaagggactcctgaaagccctgaaggttttagacaattacttaacatcccccctcccagaagaagtggatgaaaccagtgctgaagatgaaggtgtctctcagaggaagtttttggatggcaacgagctcaccctggctgactgcaacctgttgccaaagttacacatagtacaggtggtgtgtaagaagtaccggggattcaccatccccgaggccttccggggagtgcatcggtacttgagcaatgcctacgcccgggaagaattcgcttccacctgtccagatgatgaggagatcgagctcgcctatgagcaagtggcaaaggccctcaaataagcccctcctgggactccctcaaccccctccattttctccacaaaggccctggtggtttccacattgctacccaatggacacactccaaaatggccagtgggcagggaatcctggagcacttgttccgggatggtgtggtggaagaggggatgagggaaagaaatggggggcctgggtcagatttttattgtggggtgggatgagtaggacaacatatttcagtaataaaatacagaataaaaatcaagtgtttttacgca

SEQ ID NO: 221 - protein, 241 aa, Homo sapiens
MAEEQPQVELFVKAGSDGAKIGNCPFSQRLFMVLWLKGVTFNVTTVDTKRRTETVQKLCPGGQLPFLLYGTEVHTDTNKIEEFLEAVLCPPRYPKLAALNPESNTAGLDIFAKFSAYIKNSNPALNDNLEKGLLKALKVLDNYLTSPLPEEVDETSAEDEGVSQRKFLDGNELTLADCNLLPKLHIVQVVCKKYRGFTIPEAFRGVHRYLSNAYAREEFASTCPDDEEIELAYEQVAKALK

SEQ ID NO: 222 - DNA, 26214 bp, Mus musculus
  misc_feature (1)...(26214): n = A,T,C or G
cccctgagagcccagggagctgcttctccaagaccccttgcagtgggcttcgtaatgaacctgtgtgaaacaggtttgcagagctgcctggtgcctgcccggagccctggccaggtatggggagtagatgggtgaccagaaggatcctcttcccaaaaggaacagagaagggacgcaggctgtggagagagtgcctgctgtgcacgagtctccatcctcaggacccagtgaaaagcaggcatggtggcaagcacctctcaccccagtgctggggaagtgggcagcaagacaggagaatgctgaagctcactggttagctcactggtcaattggtgaagaccctgactcaaaaatgaaaatggagaatgatataggaagacacttgatgccaatctctggtctccatatgcatgcatgctcgctctctctccccctctctttatctcttacacacacatacatacacacatacacatgttctctcacacacatgcacatacacacatgttctctctctcacacatgtacagacacatgttctctcacacacacacatacatacacacatgttatctctctctctcacacacacacacacacacacagagcttattcagggacattacctacccctgagctcagaaggatggttcctgtcctgacacctctctgtgcccacactttcccctaacctgggcatcctctgtgggaaggctggctccaactagcaaaaccaggctgactagtggggaaactgaggcagacattaagtcagagccaagactgacacttgaacccactgcattctgatcccaagtcctgtgagaacactgcagatgctacctgggtcccatggctgtttctatggtagaggcagccatgtcctggggtatggtcattgtgtggacatccgtgctagtttgatgcttccattgctctttgaggcagggtctcatgtagcctagattggccttgaacttcagaccctcctaatcccacctcaggagaatgctgtgatttctggtgtgcactagaacgtctggtttatgaggtcctggggtcctatccagagcctcatcatgctaggccagtactccacccagctttcctgcagcacagcggagaccacactcttccaacaggagtccgcttcccagaccccttcctttccttctgtcatccatccccctacccaggcctttgtcatgggtcatggtttcctcgggatcgacccaaagctcccacatgacgtgtggttgtaatagactggaggagaaagggttgcttcccacatagagccaggcctgtaacaaacgacttaagcaggcgcccctgctctgggctcacactttgcggtttcagctaccagacatgtgcttttctgggaatgcaggaaactggttctgccctttgaagaagggtgactgtggtgtctcctatgtctggcgattccagactactgctggacaccttcctggctctgggctgtgaatgagatcagctgctgaaccctttgatgagtctacttcttcaagggacccctaaaatcaaaggtggccaccttcactcagcccatacaggacagaggtggttcccaaccccggaaaagccaggccaggacccagccctgataatcagctctgtggctttatcaagccagagcctctctgtctgtctcttgtactgtagttgtgaaggaactacaaaaattaaaccaggctgaagctccagggtagtggtgcttatttataatcccagaatctgggaggtggaagcaggaagatcaggagtttgtattaatagctacatagcaagtttgaggccagcctgggctataagagaccctgtctcagagagagagaggctgggggtgggggtaggaggtggctggagagatagctcaacagttaagagcacttgctgctctttccatagaacccaacacccacttcaggcaacacaaaccacctgtaactccaggtccagcatcccttctggtttccttgaacacttgcacacacatgaacacacaagcactctcccatgcaacacacacacatacacacagtctttaaaacacacacattcactgaatacccatgctcttcttgtccacaaaagtcagtcatgccgggcatgttggtgcacatctttaatcccagcacttgagaggcagaagcaggtggatttctgagttcgagcctggtctacagtgtgagttctaggacagccagggctacacacaaaaataaaacaaaaaaaagccagtcataattttgtgtacttcctctgcatgagtcacacactgtaaacacagtgcacaattagttgagagcacattctatataagattgtgagacttgggtcgggcatggtggcgcatgcctttaatcccagcacttgggaggcagaggccggcagatttctgagttcgaggccagcctggtctacaaagtgagttccaggatagccagggctacacagagaaaccctgtctcgaaaaaccaaaacaaacaaacaaaaaagccaacaacaacaacaaaaaaagattgtgtgacttacattgtgtcccttcacatgacctcgtgctgtttgccataagcataaaaaccaaaacaaacaaacaaaaaagccaacaacaacaacaaaaaaagattgtgtgacttacattgtgtcccttcacatgacctcgtgctgtttgccataagcaccctcattcactgagcaaccctgttcttgggcatggagagcttatttattcttattttatgcatatgagtattttgcttgtgtgtatgtctgtgtgtcatatgtgtgcctggtgcccacggagacaaaagaagggtcagatcccctggagcaggagttacggacagctatgtgttgctgtgtggtgctgggaatctaatccaggttcccccagaagaacagtcagtgctcttaactgctgactcctctccagctaccttcactgtctgtttgtttgtttttcgagacagggtttctctctgtagccctggatgtcctggaactcactctgtaaaccaggctggcctcgaactcagaaatccgcctgcctctgcctcccaagtgccgggattaaaggcgtgcacccggcctatgttgaacttctgatccttctgtctccacctaggattataggtgtgcatccccacccctggtttgtgtagtgctaggagttaagcccagagctctgtgggcatttggataagtgctgccactaagctacattccaccctccctcccatcccagtaccatgccccgctaccttcacttttaaaaacaggctcttgtatgtagcctaggctggcctgaaactcagcgacatagatcaggctggcctcaaatttttactagtcttcctgtttgacttctgcaatgctgggagcaaaagaaggtccccacactcatcttgatactgttttgggtttgttgttgtttaagacttatttattttatgtatatgagtacacgtagctgtcttcagacacactagaagagagcatcagatctcattacgggtggttgtgagccaccatgtggttgctgggaattgaactcaggacctctggaagagcagccagtgttcctgactgctgagccatctctccactccttgtgttttgtttttgtttttgtttttttcaagacaggatttctctgtgtttccctggctgtcctggaactcactctgtagaccaggttggcctcaaactctgagatccacttgcctctgcttcctgagtgctgggattaaagacgtgtgcgaccaccacgctcttttgatttttggttttgattttttttctatataattactttctccagctagtgaacatgtgtaataataataaaatctttgtagtgtgtgtatgtgtgtgcgccagtgtctaaatggaggttcagaggacaacttgtgaaagtcagttctcttcattcttgtgagttctggggatcaaactcgggtcttcaggtttggtgacaggtgcctatatccattgagccatctcgctgactccccaagtgaactggcagttgtgctgagggagcctgtcttggacatcctggtgttggggaccttggtgaaggcaaactgcttgctaatttcttttaaactgtgtaaggccgactccccctttcagtgagcttcaaaaacaaaacaaaaaacaaacaaaaaaaatgagaacaatttggatggagcatctgggctagtgctcataaacaagtcagcctcgctcacccacacctgcaggagtcacagaccattcctggtcccctcctgccgagtccttcgttctgttctccctgctggctgttccccaaggctaactgggtcctgacgacttctcacataggggctttgtgtctgggtttgagctttgcattcctagatgggacttttgtgcagttctgctttttgttgttgtttttggtggtgtggacttttgagacagggtctttctatgtagacctagctatcctggagtttgcaatgtagaccaggctgtccttgaactcacagagatatgtctgcctcctcttcctctgagtgctgggatcaaaggctcgcaccaccacacccagcctggctccagggatttgagtctggtctcttatttcaacatgtctgtgagagcctctggcagtggtatgtgggaccagtggctgagtggtgccaaaagactgtgtgcagcttttttgttggggagggggaggggaactggcctggagcttgctttgtagaccacgctggcctcgaattcatagagatcttcctgcctcggcctttaaagtgctaagattaaagctaaggccgccacgtttggcactctgcacggcctctttatctctttcatcagtggacattaggaagagtctatgttcttctggtcacggtgctgccaggggacattcatcagtgtccttgagtgaccacagggttgcagctttgtaacccaacatttactttattttaatcgtcgagacaaggattcatgtggttagcctcaaattccccgtgtagccagagatgaccttaagtttctcttgcctctgctttctttgatcacaggcaagtaccacaatgcccagttcacacagtgctggggactgagcccagggatttgtctgctaggcaagccctctaccaactcagctacatctccaatgcctataacccagtttctaaaggtgctgcctacaaggcagaaagtttcccaggaagctgggtgtgggtgacaaatgtgggaggctgggacgggagaatcaggactttgtagccagcctacacaacatagtgagaccctgtctttcaaaagcagtgctagggaagtagcttgtttggtaacagtgcctgcctagcatgcagaaagccctgagtgggatgcccagtagcacatgaagccagatgagatgcacagctggaatcctagcacttgggaagagtctcagaggtttaaggtcatcctcgggacatagtgagttcaagagaagcctggatcacattcgtgcctctgtcactcatggtccccacctgccttaacaacctttgctctgaatagggcagatcttgggcctggcgagacaacctttgggggcggggcacttcttttcagagatgcatgatcagacatgatcagaatcaggtggagcctctagaagcttgcctgcctctcacaagccacacataatcatacaggagagttttgtgcttcctaaatgggggaagggtgggaaggaagccatactaatatgtccctacttggccatttttccccaaaagtgaccacttggagcagtttcatgtgccagggagcccagaatagtgtgttaaaagtagaggtgggggctgggctgtcttcattcattattctctttcctgttgctcagtagctgtgcaacttgagacaagtcagttctcttctctgtgcctccatttcctccctggaaatctctacagtggttggtcgtcctcttcttccagactagcttgcagcattaggatctgcctcatctttctgcccttctacacattctcgacctaactggggatcctcttcctcctcctcttcttcctcttcctcttcttccttctgctcctcctcctcttcttcctcttcctcttcttccttctgctcctcttcctcctcctcttcttcctcttcctcctcctcctcttcttcctcttcctccacctcttcttccttctgctcctcctcctcttcttcctcttcctcctcctccttttcttcctcttcctccacctcttcttccttctgctcctcctcctccttttcttccttctgctcctcctcctcctcttcttcctcttcctcctcctcctcttcttcctcttcctcctcctccttttcttcctcttcctccgcctcctcctcttcttcctcttcctcctcctccttttcttcctcttcctcctccttttcttcctcttcctccacctcttcttccttctgctcctcctcctcctcttcttcctcttcctcctcctcctccttctcctcctcttccttcttttcctcctctccctcctcctgcccctcctcttcctgttcctccttctcttcttccttctgctcctcttccttctcctcctcttcctcctgttcctctttttcctcattctctttctcatctccttctttcttcctcatggtctatctttgatatcttctttcctggatccaagactttgcactgacatttctctgttctcctatcctgacttccactcatccccttaggaaaagttctacctggctggttcatactcagatgtaaataactggttagggccggtgaaaccagaggatacagggaccctttcttctagttgctgaatgcctgcagggtgcattccccacattctctctcctgggaatctaggttttactatgtagccttaattgccctggaattcactatgtagaccaggctggccttcaattttcagagatctgcctgcatctgcctccccagtggagggattaaagtgtggcgccacacccagccctggaagcactttcattggtttactttacagggatcaagaaagctaggcaccctcatccccgtgtcactcagccagtgaaggtagtctgctggcctggcgagctcactgggttgtgaccaagctggacctggacagacagcagctggaagtaccagatgggtcctggtatgcagatggggttggcagtgccactgggagaggcagagactttctagtgccactgagccttccccttaggagttggtgctgtaagaggtaggaggcaggagaaaattctgtcctggtacctgtacacagttgcgttgccgtgggtcccatgctgctgggctttcgcagtgggtcctttccagtcttggggggaaaggaagagagagacatagactttggacattccctgtctcttggctcatcctgactggaaggcactgaggttgatcagcatacagggtctctccttcccagtcctcagtagctagcctttgacccttccccattctcccaagcccagtaagggaggttagagatttgccatcaggaatatggggtgcatagctctgcccaggaggtgctggggagcgggaaagtattttctgcctgcctcctctctcagtggtcactgacattcagaggtcagctagactttcactgtttacattatctgccaggatgctcccaggggaggggatgaattcccatgcccattttacagacagagagctgaggctagtgcagccagagcggggcctagtgggccctagcgggctctagtgggtccttgaggtagccaggccaactctttgtcaggggaacaagggactccttctccctagccctccctgagccggctggcacggccaggcgccttggcccccactggccatctgaagttggattgtccatggaggagaggcttcgggctgtctgagtagatgtgtggggccgcatctggtcagagccaggggtctgtttgccagtgtgattgatagggtgtggtgtggagacagggacatcactctgtaggagctagagaaggggtcgtgggaggtggtggaggctgcagctggtagctgctacaggatgggggaagggtaggttgtcattgcctgggttgttgggggcttccctgtagagcatgggctgctcaggccccttcactgggcagagcatgagagaagatgcagtgctggcctctgcatgcagcaggacacacaggacagtgggtagtctcactctattacagagctgcttagatagtggctggagtcttgattgcagatatgggacctaggctccactcctggttctggatcaaccagtttcccaactgggaacaactctgccccccaggcttccccttcccagcatggggtagaccagatgtcccagcccccaggcctcccttccccagcatggggtagaccagatacctggggtggggtcctagctttgtcctgcactgtgcctctgatttcccttctttatgaaagactgtggtttgtaattaagcaagggcctccaaacagggctgatggaggccttggatgccgggtttgaagacgctagctagattgtaccagtctcatgtactcagactgccaggcactgcacaaagctgccagtttttactaaatgcagaggaagataaactgaggctccaggattatagcttgaccaaggtcacataacaaagaatcagcgagcgctctgctccaccagccctttggggaagccgttgctcaatcatgaagtcatgccttgccaaatccctctagtccctaactgtactgtcatggtctcagatacggccagaccagtgcctatcagtcttgggctgtccctgagaagtcactgggttctgctctttcctttgtggcctagagaggggaagggacttggttactgtcactcattgagctagagacagagcgagcatgccgagttgcctgccccccttcagccttggttggggcctcagccacaccttcccacagtgggtcaagctctgagctccgagcagtgaggagccctgaggtggtgattctctgcctgtgggtcttcctttctctcgccgactttgggcgccaggagccagggacggggtacatctccagtgcctggttcatggataatatccattctcatttgcttcatgcaatggcttctttctgtctcccatgacccaacggctagaggccgaaggtctagcagtaaacaaacagatgaaatgtgtcccctcaggggacttgcattcctagtaagggacagacatggaataacaataacaaacgtaataagaagcaaaaaaaaaaaatatgttctgtcctagatggtggcatctgatatagagaagcaaggtggtggtggtatgccattttagcacagtggtcctgaaatggcactctgaggtgacattagagtctctcggaggaggtgaagaagtgagccttgatggtatctgtgtaaagaacattccaggtggaggcaacagcaagtgcaaaggtgggggggggggacggtggggggcggagaaagcatgcctggagtgtttgaaggatagtttaaggctgggggtgtggctggagcagggagaacaagggagagaagcatgtgttgggggcgggaagtctatgggggaccatgagggtgcagcagattacagaggaccatttaggctgggtttaaggatttaggcttttgttccgatgaactgggagctatggagagttgggagcagacagcagggcaggaactaacaggatgatggagctactgtgagcagatggtgggggaggagcacggaggagcatctggaggctcctcaggccctgaggaggcgtggtgcaggctggcctggggaggggcgggagagggggccggagctgaggccaggtatgaaatactcaggatgtggatgtgacagcgaggggtcaggtggactcctgcagtcactgaaggacagtgttcacctctggtctagaactcagggaacttgggttcatggctcagctcgctcagtggtcttgggcaaatcccttctgcccggactcagtttctccttgtgcacaatgggagcaaccatacttatgccagcctgtgcttaaagactacgaagatgatgaatacttcatgggcctgtctcccctcgactacagggagcccgaaccaacagctgccatggcgtcacgcatcgggctgcgcatgcagctcatgcgggagcaggcccagcaggaggagcagcgagagcgcatgcagcagcaggctgtcatgcattatatgcaacagcagcagcagcagcagcagcagctgggtgggccccccaccccagccatcaacacccctgtccacttccagtcgcccccgcctgtgcccggggaggtgctgaaggtaaggcccctgcctctcccatccctgctccctgtagaggagtccctgccccctccacagctgtgccttccccctccccaggtgcagtcctacctggagaaccccacctcctaccacctgcaacagtcccagcatcagaaggttcgggagtatctgtctgagacctatgggaacaagtttgctgcccacgtgagcccagcccaaggttccccgaagcctgccccagcagcatccccaggggtgcgggctggacacgtactgtccacctcggccggcaacagtgctcccaacagtcccatggccatgctacatatcagctccaaccccgagaaagaggtgagcggggtggggggggtgggggtaggggttccggcttggtgtcagttgtttggaaatagtctggccctcatggcagacctgggggtgtttctttatgggcctctagcctgagggagacacagccgccctagtctgaagagagttgctatcttcttgcaactctgctggggacagggcagactcacagaagtgctttcccagcccgggaaggtgtgtcaagaactccctgtcaagggattcctggggacaagcctcaggctcggctgtaggacgctcctcttgtcatttcctcctcctccagatgagcaggttgggtgaggtggcaggggggcagctgcccctctctaggtgggccgaccccagatggaaacgacatggacgtttctctcttctagtttgatgatgtcattgacaacattatgcgcctggacagcgtgctgggctacatcaaccctgagatgcagatgcctaacacggtacttttcgggctggacgggagggggacggcacacacagtggctccctggctggggtgagctctcagggcagagctggtgtctctgtggaggcaacagtcatctccattgaatactgtgacagggattcagggtgcaagtagaactgagtcaaggcatactggggatgcttgggagacagagctgggcagaggcaggcgcatttctgtgaccacaggacccttccacaggaagtctcgtctgcctgattattctctgggtctcattggcttggttggggaggggaggcataggtaggtagcagatgagccaggtttggaatcaggaaacctgaggtttgtcatgaccttgggaagtcccgccacgattttgacctccccctcccccactcagttgtaaaaaggggggtgatactatctacccagagggtcataggaagattagaagggacaaaaagagggaggggttggagagatggctcagtggataacaggtaagattgctttcagaggacctcagtttggttcctcaaacccatgctcgccaagagagagccaggaggaggcaggcagttttcagccccttctgccctggtgacactgccagggggctgctcaggaatcagtggctcctatctatgcagtggctgtctaggccagtggccggctcttgcctgggctctgtggtaggtaggacccggcagaccttgctcctgcctgttgaattccatactctgggaaccttgcagagaaactccaaggctgattgagcccctccctaggacttgtacaaaaaagagccggatccctcgggttcctcctgtcctcgccctggccgggggctaccgagggcagggctgtgaggatctgctcttttctctgtggagggagccctgcacattgcatcctggggaaggggctcaggggtgactttcctgttgcccagagcagctgctctgggaccatgggtccaggtgaggactcaccaggcgcttctctgccccttccctcacagctgcccctgtctagcagccacctgaacgtgtacagcggtgacccccaggtcacagcctccatggtgggtgtcaccagcagctcctgccctgccgacctgactcagaagcgagagctaacaggtactctgccctgtacctttggggtttcctctcttccctttttcttctctcccttctttctcaccgcctctctgtttctctggcctccagatgctgagagcagagccctggccaaggagcggcagaagaaagacaatcacaacctaagtgagtggtgctgggccctccttcagctcacctaggctggggagccagcccctgcctcatccccaccccagccccttaccagcgtccctagcttgggacacccacagctccaaggctgtgaaccaacccccactccttccaggctttttaggaaagtgggaggggcttctggaagcagcattcatgaattttccaggctatccgattgcagtcttcagagcctggggcaccaggagtgaaggaggctgccccaggcagctctctccctagtagctcgactggtttcctgaccccgccccctgattagattgcacccagaccctcctcagctttcagagatctctcttttgttttgttttgttttgttttgttttgttttgttttgttttgttttgttttgagaaagggtctctaagtagcccaggttgccttggaactcagtttatagcccgggctgacctagaactcgcagagacctgcctcccaagcactggaattaaaagcttggccaccacaccggtccttgggtgcctcgtattttaaacggattttctatggggtgtccagcttaggtgggggtcccacctttctaaccgtgccttccggaatcttgcttaaactgtagttgagagaagacgcaggttcaacatcaatgaccggatcaaggagctgggaatgctgatccccaaggccaacgacctgtgagcagacttccctggggagcgaggggggcgagagaggccagggtccgggctgggcagcagctgtaggcaccaccagctctcagttgctaagggcagcagctgtaggcactaccagctctcagttgctaagggcagcagctgtaggcaccaccagctctcagttgctaagggcagcggctgtaggcactaccagctctcagttgctaagggcagcggctgtaggcaccaccacctctcagttgctaagggcagcagctgtaggcactaccacctctcagttgttaagggcagcagctgtaggcactaccagctaataagggtggtgatggaggcagcatgtttgagaaggttcctgctcctactgcgtcaagacagcttctgttagaaaggaggttttggggtgggtggggggcttcctggagaaggggccttactgggaaagtgtatgaagggctatggactgatggagaggagagagatgctggccaggagagctgaagacaggaagatgggcatggggtggacagattgcttgagcccaaggattagtgaggagctgaacatttgcacaaggctagctatgggcaagggtggggaacactggaactctgagctaagcctgcggtgagagggccctggccaggcctctgactgcccctggttgtggccacagggacgtgcgctggaacaaaggcaccatcctcaaggcctctgtggattacatccggaggatgcagaaggacctgcagaagtcccgggagctggagaaccactcccggcgcctggagatgactaacaagcagctctggctccgcatccaggtctgacccggactttggactcctcgggtagctctcactgatctgatccggctcccaggccccggggcaggggataaacatctggagacctggaaatgccacccatagggaagaaagctgtcttggtcatgataggatgcctcaatgaaaaatgaaccccagttccgtcaagcagcatatagctgcaggttcacttctgtgagaccctcccttattttgcaatccacactggaggtcagacagatctaacacatgagcttgtgtgctcacacacacacacacacacacacacacacacacacacacacacacacacaaacacacaaacagacactgtctctgtttctctctgtctctctctcattcaaagacagggtttctttgtgtagccctggctgtcctagaactagctctgtagacctggcctcaaaatcacagagattcccctccatacccagctaggtctaactctcttaaaaccatgtaacattgccgggtggtggtggcgcacgcctttaatcccagcactcgggaggcagaggcaggcggatttctgagttcgaggccaacctggtctacagagtgagttccaggacagccagggctacacagagaaaccctgtctctgaaannnnnnnnnnnnnnnnnnnnagaaaccctgtctctgaaactatgtaacataagtgttgtcccacttaaaaaaaaattttttttttgagagacaggaggtttctttgttgagcagactggcctggaaattatggctctcttacatttgccccccacccagtgctatgattacaggtccatgcctgactctgcaggtcgatgttatggggctacagtcacatatccttgggcaatgctacacactgggcctaaccttaaggaagcaggactaactaccctgccctgggtgtctgggaggcagcactgggaatctccagcagctgggctgacttaagaagtaaggcctgagggccaggaccctgccagaagtgcaacgcctattcctggtggaccataagttttgtttttgttttttggttttttcaagacagggtttctctgtatagcactggctctgtagaccagggaggccttgaactcagaaacctgcctgcctctgcttcccaagtgctgtgattaaaggcgtgcgccaccgccaccaccacccggcggcccacaggttttaaaattggattgttcatgatgggtgatagaagtcactttttttccacctacaaaaacttagcattggcgaataagaactcacccttagttaaggaaatgcgttttgatggtttccattcccaccaccaccaccacccagctcagtttaaaatcctgagagggacctagccaaggtgtaccatggtggcttcacgaaccgctggccagctgtaacttgcagcctggagagcttggtctaagctcacactgccctctgctctctgttcctccagctgagatagtcacaggagatgggggcaagtggtgcagtgggtcacagggagggagggctagcctgggctgctgtcatgtgtatctcatccttctgtccattccaaacaggagctggagatgcaggcacgcgtgcacggcctccccaccacctcgccgtcgggtgtgaatatggccgagctggcccagcaggtggtgaagcaagagttgcccagtgaggatggcccaggggaggcgctgatgctggggcctgaggtccctgagcctgagcaaatgccggctcttcctccccaggctccgctgccctcggccgcccagccacagtctccgttccatcacctggacttcagccatggcctgagctttgggggtgggggcgacgaggggcccacaggttaccccgataccctggggacagagcacggctccccattccccaacctgtccaagaaggatctggacttaatgctcctagatgactccctgctccccctggcctctgaccccctcttttctaccatgtctcctgaggcctccaaggccagcagccgccggagcagcttcagcatggaggagggtgatgttctgtgacgctggctgcccctgtgccaaggagcaggggatgcctggaggctgggaggaccgagcagagccctcccatccttcaggctgcacttggtgtgaagtagccgcctaccctgcctctctccttccccttggctgctacccccaccctgtttggacttagtgcctgcctggcagctgatggggctggaggagccctccccctcggcttcgggccccctcctctggcggcagtactatgactatgatggggaagaacaggggtgaggcagaagagaaataagaagaaatcctgctaggggagcccctctcctgagcctgggctctcctgtggaggacattttggagaaggaggtacaagtacctctgaggcagcagctggtctgggggtgcccgggcctgccttcctgggactagatggcacccagcctgtcgccctcagcctgaactcccccacaagtggggcatccacccccatttggtgctaacagctctcccctggtggtatgagggtggggtggccagaagaggagtctgggttcagggtggcgagcacccccacccccagacctcccactttgtgcctttagtaaacactgtgctttgtagtatgttgtcctggctctgcggtgcgtcctcagcccatgactatgaggggcggggcgggggccgagcggggagggcagcccagtggactccttcttggattaagaattcaattgctccatgaaggatctgaaggaggttctcttggattcagaggccaaagaaacaaccttgacagcgtggggctgagagcattgtctcactgaggccacatggtggcgctgcagccatgctggtctggacccacacctccagctgtggtctgaacagcagtggaggtgggtgtgtggctggccggcgttctagcatggccctcaacattcttcccggtgttggtagctacagaccagctggagaccaggctgtatccttatggcgataggaaatggacccatttggaacagatgagagcacaggaccctggctgggagtcaaagcttagggttcactccccttcctggctgggtctatgccctagtgaggttcaggacccgctttgctccaggttcctggatggggaagtaacctgggcagggtctctagaggttcttagttcctcggtttccaagactctttagccagggaccaaaatggtttcccctcaaagggccctaaaaggccaaaggagcctaattaaaaagaatttaaatttttttctcctctttgaagaacaagagatcaaatcaataattggagcaatgaatgttcagagaaagaaaggcggtcaaacggcgtggtcaagacggcactaggctgcctgagctgaagggttactatcaaggtcagatggaggtgtggttgaccttgtagagcctgagttagcctggccatatctccttccagttcctggtctccattgcctgggatttaccctcatgagacccacggggtaaaccccaaactctgtctgaggtcaactagagactgggatttggggctcatggggtttgggccagcacctcaggtgttgttggatctgatatttccgtcaccctggggacgtggggacgtgggaagctgccttctacttcctcacataacccgtcaaacacaccccgagttacccctgtcaccaaggcctggagcttccttcctttgatttgttcacagcctgctgcctgggcactgggtcaggactagggtgtgagtggggttctgtccacacgagggcgcacaggcccaggcaacagcggtctgaggagccagcctgaagactgagtactccacacagcctgggtgacttccatcctgcctggggctgctgatgtccaccctctggggtgaaatccaagccaggtgctgcttccggcagttcaagccaccaagaaatgtgtatctgagactggctggccagaccctgacctgcagtagcaagggagtcaggctgggggttatgactgccagttaaataaggggactatgttcttcacccttagatgatgagtgagcttggcaggacgtctgcagggtaaaatctcattcagactgacaatgtgtgctgtaaagcagagatggtccctccaaccgtttccttccaatgagggagccccctttaggccttggggacaaactctggtgggatgagatcctagcagccatagctttcttgggtcccatgtgggaggacctgaggtaggagctgagcaggcagagctgggtcatatacatgactgcccatcccccgggcgccaagttcctatgtctgtctgtctgtctgtctgcccacaccagctgctcccacttccctggttgtcagttctggatttctacagggacaactgggtaagggacactgtgacctcaggatgacctgcttgacatctcagctcccaccattttttttttccaaattggattcttcatttgctattttgtagcttttaacaagctgaaggtgtgagacgctggtgtacacacagacagacacaattctagtcctagcttcaggaacacctgtcccttgccctctctcaaggtctgtctcctcccctgccctctgagccctctggccagctggaaagagctcttttaacgcctttctggcttcccaggcctccagacccatagtccggcccctgtctcccctgctctcctctgaactcatctcttctttgctgccttttctgagggggacagtggaattatacaatatttaagcagccagagccaggtcctggaagatattattaatgtaaaagggatggaccgcaaatgcttttggacctggttacaattagagggtgatttttctaaaggtcaatgaattcagatgatatccacaggggggagagaaatttaatacctttttagtgaattaattaattataatattatatcggcttggggttcttttccagagtgattaaggcggtgatctgtcttctgcgagctggctgctgtgaggaccctgtcacgggcttggtgactgaggcccttcattctcctctcagccagccaggtagggggctgggaggacgcagacagctcagaagggcttctcaggtgtggtgattggctctgtcctgctcctcagcctatgtacgcagtcggctccctgctcttggtatcaagcctcataccatgtgacttagaggactctcctttacacttagggaaactgaggcccatggattttttttttttttttttcgagacagggtttctctgtgtagccctggctgtcctggaactcactttgtagaccaggctggcctcgaactcagaaatcctcctgcctctgcctcccaagtgctgggattaaaggcatgtgccaccaccgcccggctggagtatcagatcttaactgagcatgctagccaaggacagccctgcagggccatcctataaaccaagtagtctggaaaaccaacccccaatcggggaagtgccagtgtggcatttgatcttcctgtcaggaaactattatggggtgtggagtgtgctcatggggctgcagggcattgctgtcccagggagaccagagcatggccacgtttgtccctgtctttagtcaaacagccttctaacaaaccttcataggacatcactttattccttgggagacaggctgacagtcattctggagccccagctcggcttcttagagaagtggagagtgggagcctgaggctagagaggcatcaccagggaagtgctgagcagtccctgagtgctgaccctagtgtgtgtgatggtgagctgactggagtgctccccctggaggaggaagaagggaacgctccaggtatgggacacttgtagtgcagagaggtctaaaagtgcaggggccaagtgagggcctggcctcatgtggcacttagtccatgaggcaggggcacggctgcctttgcctacccaagttccagatgtgttgaccgagactgctccacaaggccacagcatctgggtggaaagccagaaacaacaaagccaatgagaccagcacttaatggtgggctctgctgcgtgagagtctctttgtgcctcagtgtccccatctgttgacgagattgcaatatataactaattcaggctgctgtatgaattaaaatgggagtaaggggaactaaactttgctgacacccttaggggggatcactgccccccattctcttttagtgggggcaccaacggaagctctacattaggcgagttctttgttgggggagatccacttttcccatgactcagatctctcttctgcctgcctctgtccctctccctcggtgccctctgtggcctggctcccccgcagcccctccccctctggctcacatggcttgcggcaggccagggagggccttcccattgtactatctttgggccctaaattaaaattgatgacatcttgaagtgagcactgaaggtaattttgcttcagagccggggatgctaatgaggccccttaatggtgcaagtgctgggctgacgggtcgtgtgtcacacgcagcagctaggggggtaatggccgcggtaagtgctggtaattacaccctgtcttgctgtattttggcaggcctggtgggagagcagaggctcgatcaccactggtggggacgcccccacccaccacgggactgacagccagggatacttcctgggcccagccaggccccctcagctccagcaccacctagacttggtggacatcctctgacacacacatgctgcccaacccacagtcatatcatcggacaccgcttagccttgacatttgtccccagagcctgggcacgttcccagggcaccctgcatgtggagtcatgcacacgtcttgcctgctacactccctctaagcacaaaaagatccatgtataggcaattgcaaacccacacaaaattgccctctcagtgtgaataccctgagcacccactgtgcttgcatctaggagcgctcatcctcccaagcaactctccccacatcctctgtctgtctgtctgtctctctgacacagtctactttttaatttatttatgggtttgcttattttattttttatgtatactttttttgcctgagcgtccgtctgcactatacatgtcttgtgcccaaggaggtcagaagggggcagcagatcccctgggactggagtcacaggtggttgtgagcggccacataggtgctgggaattgaacctgcattctatggacgagcacccagagcctgtcactgacccatttctccagaccttcactgttacatttgcaatttttaattatgtgtctgtgtgtctgtgtccatatgtgagtgcaggtccagaagagggcgctagagtgccgggagctggagttataggtagttaggagcagccacatgtggtgtggggaactgaactcaaggttttctacaagaatagttcatactcttaacccatgctcagctcctagcatccacatggtggctgcacccatctgtaactccatttccaggggatcagatttcatcttctgaccttggggtgaggggtggggggaggaggcaccaggcacacaggcaatgcatatgcaggtgaaacacccatacacataaaataaataaatccttgttaaaaagcaagcaagaaaagaggacctaccaataaaacgggagagttcacaaagctcacaggctcttgtcctgtgggtatcctcctctcccacggtctaccagtcacgtgatcacagtaagggttaaaagtgcggactccttttgaccgcctgggatcgggatcgctgtctaggtctatcatgtgcagtcactccgcctctgcctcgattttcttgtctgtaagatggggatgataagggcctggcacaaccctgataagtgtgtagggaggcttgtgtcctggcagagggtgccctccaggatgtgaagggagtagaaggtagagccggggcaccctcctaaggctgggtgatcagggagggcttcaagggggaagcaggcttgggattgtaaccagcttgtctgtgaaccagcaccctcctatgctgctcagccgtgtcctggtcccgggtgggtagtcacatctgagcaatggggacagcttagagtgtctgggagaggccagatgtagggccacccattccatatgcagggccaatggtattcctgctgtacctgctatggtcctatcggtgcacccaggaatctaaacgggcctagggaggccacatatctgctggctgtgtctcacaggaggaggtgatatcctggtgaaatgtctcagagaatactcagaggtcatcggtgaaggaagtcaggataggaacgcaagcagggcaggctcctggagctgacgcaggggccatgcaggagagctgcttactggcctgttcctcacacactgctcagctaacttttctctcttcctttgtcctccctccccccccacctctctctctctctctctctctctctctctctctcactgtgttgtcctggttggctggcttggaactcactatgtagaccaggctggccttgaacacagagagccagctgccttttcctccgaagtgtgccagcatgcccagctgaaattttgtactacccaggaccacctgtccagaggtggcatggtacactgtgggctgcccccccccatcattcatccatcaggaaaatgccccacagacttgcccacaggccaagctacagacacattttctcaagtgaggcttcatcttcccagatgaccctagcttgtgtcgagttgacttaaaaactaaccagcataggcgaatacagatcgttttctttctcttttgtttttatattttccttacttcctgttgttgttgttttgagacaaggtctctatgtagcctttgctgttccagaactcagtatgtagaccaggttagcctcaaactcatagcttcatctgcctctgcctaccgattgctaggattaaaggcaaagctaccacacaaaactatgagtaccagtctttaagttgctagttcaggaagagatcaaaagtcaaagttacaaatctgtttttttatttattttattttatttatttatttatttatttatttattttactgcatatgattctttttgagtcaccttgaagttaaaaacacacatgcaaacaacagaaacctacggatgggaccagaggaggtggcactcatctggaatcctagctcttgggggataaaggcaaagagagcagaaatacaagtccattcttggctattagcctaataaacatgaaattttgtctcttaaaaaaaaatgttgggcatggtggcatatgcctttaattccagcacctgggtggcaagggaaggtggatctcggtgagttcgaggccaccttggtctaccaagaaagagttctaggatagccagggtcacacagagcaactctatctcaaaaagcaaaacaaaacaaaacaaaaaagtcaaaagaggggctgggatgtggctctgttgcatacatgagtcctgaagtcctaggttcgatctctagcaccaaacaaacagggaatgggggaccacatctgtgattctagtatttgggaagtataggtaggagtatcaggagttcaaggttatccctggctacctgaggccttgaggtcagctcaggctacaggagaatctgtgatcacctgggaggcatatgtgtttgcattggtaaagggcactggatccagactccaacagtgagaccgaccacttccagatatcctctggggtggggcgagactggggtgggctactgctttcagtgggcagagggcctgggaaaggggagggggggagggctgctttctaatgaaaaattagtgtctgctgtgcttctaatcatgtggttccatgtaattaagaagctaattagtgccgtgtcaattcaggtttaattagtcccctcttcagagaagtcaggaagaccctcatgctaagagcttctggaataaaaatgtgggcgtggcatggtaggtgaaagggaagacgtcaggtatggggtggggggagcctcacttcctcctaggatcagtgacttgggtctcctttataccgtccctcagtgaccttggccatggagacactggagccatctgaggctctctccgccctccagcatctgtgaggacactctactaagtgtccttatgttaccgttcccctttccggattcaccctggaacccatagttcacaccccattctttaaacttgctttgtgataagcattgggtactttcccaaaaatggtgggggaataggtacccagaaagcttaaggaatccactcaaggtcacacgtccagttccgtgggggcacccagcctgccagaccccaagccctgtgtgaccgaggaagcaaagcttgaccctcacagtaggagccagctgcaccctccagcgctcacatcttgctgtttctctgtgcactggctgggtttgtgtgtcaacttgacacaggctggagttatcacagagcctcccttgaggaaatgcctccatgagatccagctgtaaggcattttctcaattagtgatcaatcaggaagggcccattgtgggtggtgccatctctgggctggtagtcttaggttctataagaaagcaagctgagcaagccaggggaagcaagccagtaaggaacatccctccacggcctctgcatcagcttctgcttcctgacctgcttgagttccagtcatgacttcctttggtgatgaacagcaacgtggaaagtgtaagcccaataaaccctttcctccccaacttacttcttggtcatgatgtttgtgcaggaatagaaaccttgactaagacactctgtgatgatggcggcttcctcttcaggcctctcagatgaacatctccgcagtcagaaaagcctctggaccccgctggagaacagctcatactctttgttgtatctctaatggagctgggttaccaccatggcctgtctcccacctgagatgaaaactctgtattggggggggggtgcttcctgttctgttctgagctcctggcacctaggatttgttctgaatctgtctatagaatgaatggacagacatgtccacgggcatcaagagccctggcacaatgcactctcgacagctgagcctgatctgactccttcaccagccattgtttcttccccaaccccttcttttggtgacagtctcacgcagcccagtctggccttaagcttagtatgtagcagaggatgtccttgaactcctgatcctcctgcttctgtgtcccatgtgcagattgcatatatgtgtatgaatatatgtatgcatatataggcatatatgcatacacacacacatatatatatgtatatatatatattttttttttaaactgggcacctggaattcagtgtgcaaaaataaaagataaaattcatttctggttctgttttgagagaggatctcctatattctaggctgacctccaaagtggctcggaaggcaaagatgacctcaaatttctctctctctctctctctctctctcctctctctcgtgggtgtgggtgtgggtgtgtatttccatctggggtgtgtggtcatgtgtgcatgccaatgtgtggattgcctgtgtgcacgtgtggagacctgaagctgatggcgcgtgtctttttgtgtctttttttttttttattgttcttcactttcttgacatagtctctcagtggaagccagagtcagacacttgctagacagactagccggcttgacctgggcatcccgctccctgctgcacctgcccagctcctgtgtatacccatgggttccaaagcctggtcctgaggcttgtgacccagtgagtcattttgcgctgggcaagcatttctccaactgtactgtatccccacccctcttcttgtcttttcccgctggccccagatttaaccatccttctgttgtggcttcttaacagcgaccctcgccaccccttcccctgctactcagcccagacctggtggttgggtacagagcagtcccgatggccatccttcttggtgtcagg

SEQ ID NO: 223 - DNA, 1755 bp, Mus musculus
ctgaaggacagtgttcacctctggtctagaactcagggaacttgggttcatggctcagctcgctcagtggtcttgggcaaatcccttctgcccggactcagtttctccttgtgcacaatgggagcaaccatacttatgccagcctgtgcttaaagactacgaagatgatgaatacttcatgggcctgtctcccctcgactacagggagcccgaaccaacagctgccatggcgtcacgcatcgggctgcgcatgcagctcatgcgggagcaggcccagcaggaggagcagcgagagcgcatgcagcagcaggctgtcatgcattatatgcaacagcagcagcagcagcagcagcagctgggtgggccccccaccccagccatcaacacccctgtccacttccagtcgcccccgcctgtgcccggggaggtgctgaaggtgcagtcctacctggagaaccccacctcctaccacctgcaacagtcccagcatcagaaggttcgggagtatctgtctgagacctatgggaacaagtttgctgcccacgtgagcccagcccaaggttccccgaagcctgccccagcagcatccccaggggtgcgggctggacacgtactgtccacctcggccggcaacagtgctcccaacagtcccatggccatgctacatatcagctccaaccccgagaaagagtttgatgatgtcattgacaacattatgcgcctggacagcgtgctgggctacatcaaccctgagatgcagatgcctaacacgctgcccctgtctagcagccacctgaacgtgtacagcggtgacccccaggtcacagcctccatggtgggtgtcaccagcagctcctgccctgccgacctgactcagaagcgagagctaacagatgctgagagcagagccctggccaaggagcggcagaagaaagacaatcacaacctaattgagagaagacgcaggttcaacatcaatgaccggatcaaggagctgggaatgctgatccccaaggccaacgacctggacgtgcgctggaacaaaggcaccatcctcaaggcctctgtggattacatccggaggatgcagaaggacctgcagaagtcccgggagctggagaaccactcccggcgcctggagatgactaacaagcagctctggctccgcatccaggagctggagatgcaggcacgcgtgcacggcctccccaccacctcgccgtcgggtgtgaatatggccgagctggcccagcaggtggtgaagcaagagttgcccagtgaggatggcccaggggaggcgctgatgctggggcctgaggtccctgagcctgagcaaatgccggctcttcctccccaggctccgctgccctcggccgcccagccacagtctccgttccatcacctggacttcagccatggcctgagctttgggggtgggggcgacgaggggcccacaggttaccccgataccctggggacagagcacggctccccattccccaacctgtccaagaaggatctggacttaatgctcctagatgactccctgctccccctggcctctgaccccctcttttctaccatgtctcctgaggcctccaaggccagcagccgccggagcagcttcagcatggaggagggtgatgttctgtgacgctggctgcccctgtgccaaggagcaggggatgcctggaggctgggaggaccgagcagagccctcccatccttcaggctgcacttggtgtgaagtagccg

SEQ ID NO: 224 - protein, 543 aa, Mus musculus
RTVFTSGLELRELGFMAQLAQWSWANPFCPDSVSPCAQWEQPYLCQPVLKDYEDDEYFMGLSPLDYREPEPTAAMASRIGLRMQLMREQAQQEEQRERMQQQAVMHYMQQQQQQQQQLGGPPTPAINTPVHFQSPPPVPGEVLKVQSYLENPTSYHLQQSQHQKVREYLSETYGNKFAAHVSPAQGSPKPAPADGVRAGHVLSTSAGNSAPNSPMAMLHSNPEKEFDDVIDNIMRLDSVLGYINPEMQMPNTLPLSSSHLNVYSGDPQVTASMVGVTSSSCPADLTQKRELTDAESRAKERQKKDNHNLIERRRRFNINDRIKELGMLIPKANDLDVRWNKGTILKASVDYIRRMQKDLQKSRELENHSRRLEMTNKQLWLRIQELEMQARVHGLPTTSPSGVNMAELAQQVVKQELPSEDGPGEALMLGPEVPEPEQMPALPPQAPLPSAAQPQSPFHHLDFSHGLSFGGGGDEGPTGYPDTLGTEHGSPFPNLSKKDLDLMLLDDSLLPLASDPLFSTMSPEASKASSRRSSFSMEEGDVL

SEQ ID NO: 225 - DNA, 59575 bp, Homo sapiens
taaatgaagggcagagctgtttgggtgactccatgctctgcttctccccgagggaagccaatggtgcttaccatttacaaggcttgttacagctgcagggttattttgtcctcaactcagctctgggagacggagccaaatggggacccaggtatcttggttccgggtgccctggaaggagttcaggggatagggcaggggacaccctaggtgggcactgaatctagggagagccaactgggcttttacgggctaatggcctggtgactcacagtcagaggtgggcagggagtgggccagggcaggcaggagcccttccagggtcccacgtgcgctgtcacaggcctcctcagcctgtttctggaaagctgagaagtaggtggaaggggactcccacccctcaagtctggctgccctttgagggtctagctcttggccctgagccctcctggggctctgtttatgactgtaattgcatcattagccagagttaatagagttacttagcacctgcccccacagggagtagcccagccaccccctgggttctgtctcttccttttcaaagtcaactcggtttctgcaggcaacaggggtttccccaaccacagctgtcatgaaaaccaggttgggcctttgtcctggggatggagggcagtcagcacttggggcctggcttggggctgccctggagatgaccatggaaattgggttggcctcctctgatcggagggtgggagttcagggttcccagagctgccagaaatgttcacgtcccaggacgcagtgaacatatatgcatgtacagtgtggatcctcatctgagaggagggagatgaaaacacacccacctcacaggctgttgtgaggactaagggtgcggcagtgcctggtacatggtgagtacatgatgttgctttctgggttggtgtggggtttatgtaatggttgtgagtttgtgtgtgtggttaaagtgtctaggaatgtgggtagagatgaactgtgcatgtgtgtctatgagagtgtaacaataaaacaagattatattaatagaatattcatctcttcttttatgctatactagaacaatattataataagattgattatacaatagttgccaacatttattgtgtgtttagagtgaggtgggaattactgtttgcattacacttacttactcagagaggttaagcaagtcacttaaaatcacacagcctggaagtgacaggattggaattttaacctaggtccaattgactccaaagtctgtgttctcagtccctaaagaagaccacttcttcaaggggtttcccaggagttctctcttaaaaggtgggggtgtggtggtctggggaccttcttttctctatccagggtttcctgctctaagcagatctttgggaggcctaggtgggaggatcgctggagctcaggagttcgagaccagcctgggcaacatagcgagacctggactcaattgaaaaaagaatttgtatgaaaaaaataaaaataaaaaagcagggtgggaacttgctgaggcccctgtctgagcaccatacctgtttcctggcctttcttctgagctgccagcatgggtgaccaaaggacctccggctggaacctgtcttgactggccagggaaggagactggttcaggcaagacttcctgggcttctttggaagccccagacacccaggaagggaggaggcatccttactgatggccttctaggtgcccggctttgtgccatgcattccacgtccattaacgtacagtgcagccctcagcaggcccttgtttaatcagatgtgcagaagaggctgtggggatcattgggtgagaatgggacggcagtaaagtcataagagcactggaccaggagtcgagagaccccactgtgcctctcactggctgtgtggctgggcaggtctctgctttgttcagcctcagtttccatatctgtgaatctggatcatctgtgggattccctccaaagcgaaccttctacaaatctttgccaaaggcaccggggaggaagaaaaaggaagagaaagcaaggggtggtgggggtgggttgttaggggtgtttgggagatgctgcagtccgcagaattgagctttagctaaagactggtcctggtgaagcaaccaggaagtttttcttgggacagccatagccactatatattgagcactggaccagtgtcacctggtcagggggttgttgagaacgtgggctctggggccaggctatgtggcttgcacagctctgccacttaacactgtgtgagcctcggcaagctgcttaaccccactgtgcctcagtttccacacctaaaaagtgagggttcttgcagcacccacctactagtgctgtcgtgagggctgagtatgccgatattgatgcacatgtagtacttagaatagcgcctaatgaactgttatgactcagtgagttatttatttctcattcttaagtgaggaaatagaggcatggagagctctagggaaggaataaagacctatgggttgcaaacaggcctctccatgtgtctaatgttctctgatgtaatgctttacgtggggcttcccaccactctctgtcccaccacaccagcctcctctccttgttgaataagacggtgcagggggcttggcaatgcctgaggcatctctaccacccctgccctgccacttgggtttccctgggtagcatctggcctggccactgaccatgcactcctagctgtggctgtcccctgctctcctatcatctgtccctcctccacactgcaccagagatacagatccccttggctgtgatgtcattggggacagagataaaatcgcagtgatagggtaggatctgggacttatcatgcccacaggaaatgctttgctgtgaaatggcaaagccgtgggtgagagccaagaggagcagaggcaacaggcagggtcatcaccagctttccttcctggctcttaagtgtgggcttaaggaggaaaaatgaggtctggccacccatcttttgtccagctttcttatggggagagccacctggccccataagatccagcacctgcttgccaggccatgcaggccacctggttggctcttatgcattcagcagtggtcccagagtaagatgcggtgctgtagggattaatccagggattccaccagactctccatccagaaacccatggctcatattccctcctcgtagcccttcctcactccttccctataagcaaatctttccctccatcagggcacacatttcagagagaccggggcactgttccatcttactgcagcctggctgggtattatgatcacctgcggaactcttagacaacaccattgcatctgaatctcttggggaggggcctaggcatctttatttaatttttttttttttctgggatgattccaatgccctttctctagggcagtggttctcaaatttgggcatgcatgagaactccctggaggaattgtttaaacacagatgctgggcccctcccggtgtttctgcaaattccatgtggtctagaatttgaatttctgacaagtcctctagtgatgctaatgctgctggtccccagagcacacctggaaaaccactgccttcgggtcctgccgctttgcagctacccaggtgagagccgtccttctcctgggttctgtgtctctgactttgggcctggtaggcctgtccccttttgaaggcaggtcgccaggggcatggaccacttctgagaaaatttggtgtcccctctacagtcagtccttcccatttctccacctgtccccacctcccctgaaactatccactgttcggccttgcagctcttggtcccactctctgggacaagtgcttaaaactgtgcactggttgatgaaggcaggatgaggcggacaaacaaggatggcactagctgaggggcctcagaacatgcgtcagggtctgaagctgctgtgaaggtgcttggagctaaagtagcattattgcaataattggggaggtgttcagagaggaccctcactttgttgaagggaggctcttaaaatacttcctgttatttcactttcccaccctatggagggcaagtatttgattccagcttgaatcgtagttgttgttaacaataaaaatgatacagacacacacagaaataagctgttcccttttcctttcctctcccagaccagagatgtagggagggtagggggagggtccctgctggaggtagtggagtctctgtcatcttctaggtggtcctgggccttgagagagtggatggttgggagagcctgggggctggcccctgggggcaggggtgtggagttgtttgtggaaactggagggagttggggtgaagcctggtaggaggtgagaagaggtggcaggtcccacagccctgctgcaggggaggcgaggcggggccgggagtgggggcgagattggtgtctgagcccgccagtcctcaggtgactgggcacaggggtttgctgtgttttggtccgtgccgtacccctagcacctagaagagagcctcatatatagtggctgctcaataaatctttgtggaatggatgagagaatgggattgagcccccattgtgtgcccagaaatgcagacaccaaaaaaatgctctgtctaccgtctctaccctgcaggtgcttcaccagctgacacccaggggcctcgcccacaggtccacaaggcgctgagccctctgcctctgccctgtctccctccccgcacagtgatccaggcccagcctcctcctggtgtagggctcacagtctgttcctccccacagagagtctgccagcacctcccccaaccccccctccccgagttctaccagtgggtctgtggggtggggctccggtttgttttctcctgtttgccaagggaagtcacagcctgtcctttgccttgtttataattgctttgaggacagcacctgccgcggccccccacagtccctgaggggtgcagagtggccaggaggtgacacactatactgtccaccccctgccgcctcttgtcccctcccagctctagccaggtgcactttctgctgccttgccaggacggtgctggctggccttgctttggggctaattggaaccgtagagctgggggtgtcagagggcagctggcgctgcccccatgttgtcaagaggaggggatcgaggcccagggattcagcagcacaaggccttcagtgtcaacaggcatgtactgagcacatcagaggtacctggcactgggctggccaagcagggcgggtgggaacaagatcacagcttctcccgcaaggtgccgatgtcctagccagggaatcttagtaaccacagagggcagagaggagcagaatgcgagaagctagtgtagactaatgtactaaacaacataagcgcggtgatacctgccctttgccctgaagagcattctccttgggcctcttgctggcacagagaccttgactcagcgtggtttaggccctcagccctttccaccttctgggccccaggaagggctactctactgctccctgggccttctcacctgggggtcacctctgcaggctacgttctggacaagtccttccttccaggaggactagaggctgctggagcctttgaaaggaggctctgagccacccacctgccacttggaagctctggggccaaggggagatgtggtgctggatcagggccgacagctcaggcctccttggacctgcctgtgactgagcctccatgcttgggcctggaacctgggggcagtgcctctgttcctcccacctccagaaccttcttttttgtttgtttgcagacagggtctctctgtgttgcccaggctggagtgcagtggcacaatcatggctcactatagcctcaaccttctgggctcaagcaatcctcttaccttagcttcccaagtagctgggaccagaggcacgtgccactacacctggctaatttttaaaattttctgtagagatgggatctcaccatgttgcccaggctggtctcaaactcctgggctcaagtgatccagccgcctcggcctcccaaagtgttaagattacaggcgtgagccaccttgcctggccacaagccttttttctcccctccaccctccgccaccctctgagcctccatctagttccacagcatctgcagccttggactatctctctctctcctgctctttgtctccccttctctccttcctctttatttccttctctgccaccttccttcttttgatgtgttcaaaggatgaccagggcccaccccaccagtacctttctcacagtcagcctccaagtcctgctgtcaggggcccagaggaatggtccacggtagggtgaggtggctgcgaaggtgcccagcctgacgcaaccccctacccatggccaggaaggggtgtgtggtggctgggacatcctgggcggggtggcgggtgaaagaggctatggtagtcggctcctgtgggttgaggggcagccagcagcctgggccaactgggggaagggaccctccctagacagccccaagcattatcactactccagacctgtgcctaactataggttgtcatccacttctttggatctaattatagtgttttgcgaaactaggtatgggaagaaaatactgtatctatttacttatatctcattcttttctttcttttaaaattgtgaaatatagcatagttgcttaaaaagcataaacatacacatataatgtagtaaataattataaaagtgaacccctggctgggtgcggtggctcacgcctgtaatcccagcactttgtgaggctaaggcaggcagatcacgaggtcaggggtttgagaccagcctggccaacatggtgaaaccccatctctactaaaaatacaaaaattatccaggtgttgtggcacgcacctgtaattccagcttgggaggctaaggcaggagaatcgcttgaacctgggaggtggaggttgcagtgagccaagatcgtatcaatgcactccagcctgggtgacagagcaagactccatctaaagaaaaaaaaaagtgaacccctaggcaaccatcacccaggtgaataaacaacagaatgtagcttgtacgccaaaatcaactcatgtgccctccacccccagaggtaatcactatcctgactgtacgataatcagctccttgcctcttttattatgtaaccacctatgtctgcatcccttagctgagtttagttttgcctgactctgaatttaatacagatggaatggcgctggacatgttcttttacgtcaggcttttcccacccaacagtgtatttgtgagagtcacttatgttgtgtatagccgtagtctgttaattttctttcttttctttttattatttatttatttttgagatggagtctgctctgttgcccaggctggagtgcagtggcgcgatctcagctcactgcaacctccacctccccagctcaagcgattctcctacctcggcctcccaaagtgccaggattgcaggcgtgagccgccgggcctggcctttaatgtatatttcaacttcagtaaatattttattaagtggttgtactactttactccttgctagtggcccacagagttcctgttgctccttagccttatcaacacttggtcttgttagtttaatttctgccatgatggtgagtgtgtaacatgtctcatcctggtgtattgcattttcattctcattttaaaaatatataattttggggtatgtttgctgacatctataatatattcatgcatcggggtatatataagcaatttacaaggaaagaagcatatattgagagtgctcaaaagtttttactgataggaatatatgatcaaaacggttgaaagatcagggtaatattgaatgccaggaagggggttggcatgtagcttgggagttggaaggtgatattggtcttgtggggagaccccctaagtggcagtgcctgctggggctaagaagcctcttcccagagggtactgaaccacagagtacccatcacccttcaggccctcttgcctagcacatctggtgggggagagggggagactctcaggctagagccctcagcaggtgtaccgttcaatttggaattggcaggtgcccatcttttaggtgcttctagggcagtagttctccactaggggtgattttgtccccctaggggacatttgccaatgtctgatgatattggccagggataccactaaacatcttaaaatgcacaggacagcccctgtaactaattacctggccctgagtgtctggtgttgaggttgagaaactctgatctaggaaaagagccaggaaacagatttgccataaacttgctgcatggcctcgaggaagtcacttaagtgatttgagcctcagcctccttggaatctgaaaaatggatagcaagcgttgctgcccttccccttcatggggctcttgtcaggatgggggagatggtgaatgtgcaggcattttgggggaggcgtccctgcaaaggggccttgtggctgttgcgttccagtagagccaggccttttcagcactggcccttcttccttgactgtgttccctgtccaccaagctggaggcatcaggtgaccgctgtgaacctcagtcctggttcgtgctgctgcaggggctgtgaggcgcttcccccacagtccctgcgggccccagccttttgatgagggctgcagaaatgaggggttctctgggagccttggggcccaggacaaaaacatttccaactttgtccttagctggatgggagtccaaggttgtgggggtgataagaggtatttatcatgttccttatctgaggccccattgcaggtctcgggcggcaaggggcgggagccagaggtcctccctgggggctctgcacacccaggcctggctcctactcatcctttgtgtccttccagaatttgccagcccagggaggcccagggttggaccagagtctgggtccatcctccctgggcctctctggcctcactgttctgggcttccctcacattgctggcatctcctgccttctccaggagccacggcctgcctcatctcctctctgctgcccgcttccttcctgaaacctgcactcacgaaagggcccagtaaactcatccaccctgagacgcagacgaccgataatagcttaacctttcttaatacagggtatttgcttatcaacgatgggaatcccttggccaccagaaagaagcactaagtgaaatctctgcccagtctctttggcaggctgctaaaaaagtgctggggggctgaggaaccactgaacttgcatgtgtatcaagaacagtttctgcacaagtgaaaagtgtgcggtggtgtggatcttcccggagctgcccagggctctgcttgatctcaggctccatttcaaggtgggctgtagtacggcctcgacctgggtgtctggaggccctgggaaggcccaaggccaagactgcaggtgtatggccagtcaggaagatggtgagctgtggggcttctggctagaaggacacatgtctctaggaagcggggctggggttagggttaggcccaccctggacctggtgggattgggactctggcgaaattcttgctgctctgtgtctctccatctgcctagggccctctgaggtcaggctggggtcagggcggccatgagaggcctcctgtgggaggaccaaggagcgctgtgggcgcctggagccgggcgggtgagattgaagcagtctgtgttgggtaggctgcggtgtgggactgtgccgtcggggcgcagttccctctgtgctgtgagtaatcctcggccgcatttgcagctcccaggggattgtgcaacttcctctccagctgaggtgcagggggctgggtgagaaacagcagccgccggggaaatgaggaaactgagcccggccctggggctggggtgcggccctgggctccggcccctggaggagctgagcattccaggggcctccttccagggggctgccctctcgaaggtatgagagcacacgcgtgcatgtgtgtgagtgtgtgcatgtgtgtgagcatgtgtgtgaatgtgtgtccatgtgtgttagcctgtgtgcatctgtgtgagtgtatgtgcatgcgtgtggtgtctttggggaggtgggtgggtagggatgaggcccctcaggctgcactggcattgggatgtctttggggaggggtgggggtctctgagcatggccaaggctggggtgagggaaagaatggggaagaaggtggccaagctctggagtgcaggttggacagcgtgggaaatcaggagtcagccagagttgtgcttcagtttcctcatctctccaggcttatttcaagggtcgagtgagaaggtcatgggcaggatgggcttagcatgtcactggccaggccacagtgaatacccatttacattaggggctgggagcatatgctctacatccacctgcttgaatcctggccctgtcgttttgcagtttcatgatgctggcaagttatcctcctctgcttcctcatctgtaacatggagatgacagttatagtgcccaccttgtgagttctgaagagtaaaagactttactcacataaagtgctcagaatagagccagcctcccactaagtgcctgcacaggttaacacttcaccaggacatagcatgtttgtgtgcagatggcaaaaaactgcccagggctcctgacgatcatttttgatggtggaagtttgagctggaactgagattgatagtaagagctcatgtttacctggccttattccatgtcaggtactgtgcccagtgattcatctgtaccagccccttcaccctcagtcaccccatgagggggatgctgctatcattcccattttgcagatggggacatgtaggcccaggggctagagtgacttgctccagggcagctatatcagtgagggagaatggcagaatggtccactcagcccacaggtgggcccctcacccacacccctgccccttttctgggttccaatagaagtatgggagaggaggaggatggagggtctgctgggaggggtgtgagggctggccttgcagcctgtgggctctggccagggagccctttcttttctctgtgccatccccaattaagtaatcaaagtaacccacagctataaagagttaaattaatatagcgaatggagccaggtgcggtggctcacgcctgtaatcccagcactttgggaggccgaggtgggcgggtcccctgaggtcaggagtttgagaccagcctggccaacatggtgaaaccccgtccctactaaaatacaaaaaattagctgggcatggtggcatgtgcctgtaatcccagctacttgggtggctgaagcaggagaatcgcttgaacccaggaggcgaaggggttcaatgagcctacattgcaccactgcactccagcctgaacgacggagggagactctgccttaataataataataataatataaggaatggtttattagtagttggagttggaagagacttcctaggagagtgagctccctgccagggtgtagtcttgagagagcagttgaaggccactcatctgtgggcatgagggtgcagtggttctgaatctggcttcagattcacacaggcctggttttcagctctgtctgagccagttactgtttggcctcaggcctcagtttcaccacatttaaaatgggggtgatagcagttcctatctcctagggtgatggtgaggatgaaataagacaccatagtaaaatgcttagcacaggtctggcctggagtaagtgtctgacagatggatgccattattaggcgcctgttgtagagagggccacgcgccaggcagatagttgggctgcacagatacttttggagggaggtttttcaaattgtggatcagggccactaattggaccctaattcagccatgaaatcagtttggtgggtctccatgaatttttttttaatgaaaaagaagagactagaaaatattcaagtgtattgctcagtatcagtaagcattgttgtgtagaacatgtttcgtgtgtgtgtgtgtgtgtgtgtgtgtgtgtgtgtgtatgtgtgcctagtgtcaaataaagtatatttttctgtgagccatggtccaaaactttggtgccactgcattagagattctgtccctcctgtgccatgtttatagagcacctactgaatataaggcgcagcagcagtgctatggccagggtgcctgtcctcagcaaacctcatggtctgactggagaatcagggcccagttcttagcaaggtggttaccaagactgtgggtcagcagaggagggagcagagtggtcagagagggattcctgggtgatgaccctgtgtcaggtggggacgatgagagggggtgatgcctggggtgaatggttggcctgggtcctgggggctggggctgggggctggagagctacctggaaaggtgggaggctgccgtcagtggaaggctgcagggtcaggcctggcaggagctgcccatgcttgctggagcagggggttgggtggaggttggggtctcaggattattcaagaacattacatttattgtgtactttatttctatgattattacattgtaatatatgatggaataattatatatgggtgagggctgtgccagtctccctggctggggtggggtggggtagagaaggactcggccttactgatgccccctcccccagcttgcaggatctgtagtcactatgggtgagacccacgtgggcctggcctgcaacctggctctcagcttgagccctatccagaagccagaagacttcccactatttagatccctgccctgggaagtgcttggcctagtcaggacctcagtttctccatctgtaaaggaggcacactgtctcctgagcggccagcctcctgggtggtgatgcccatcttgtgacctattgtggatgaaccggctgcaggaagtatgaagagctctgggtgggttatgattgtcgtctttaaggctgggaggactggggaaggtcatgaggacatcagctgcctgtctggagagcccctggcctccctaccctgtgacctagggcagtgggaggagaagcctgtgacccatggcaggctggggatatccccagctttgagtgcaggcagcccagtaggggcctcagatgatgagacccagatctggcctaaatctgggaacccccaacctctaaagctccactcttcattgagtaccccaggagtcccagcttaaggggctgtggtggcaggtggagaggcagtaacctaggactgattggcaggggccagttttcaggaggctgtgggtggcttccaacccactgagcacagagcccagaggctcaggcatgagctcccacagtagaatgtggtgtttaatgacaggtcacatatattggcactcctgtgtgccagcgctgtgctaagcacttttatatatttgcaaactttatacaacaaccgaatgcaggtctttttattatcccattttacagggataataaaatgggcctcaggaagctgaggcccagagaggttaaatctctcacccaaggttacctagctagtaaatgggagagctggcctgagggcctgagttctggattcgggatactagagttcaaatctgggtagtgccactttctagctgtgggtcctcaaacagtgactgaatctctctgaccattggtttcttcctctgtgccttcctcaaagggttgttgtgagagctatgtgagataaagactgagaagtacatagtacacaataagggccgaataaatgggacctgccgcatgacctgcatgccagtaactgccgtgtgaccctgggccgggtgtctggcctcctaggtctcagtctcctcagttgtgtgacacagggcactgaccccttccttgctcctctcaatagggttgttgaagatgttggatgggtcctgaaggagaccttcagtgaaatagaagtggtagaccagcggtccccaacctttttggcaccagggactggtttcgtggaagacagtttttccatggatggatggcaggggagggtttcaggatcattcaagagcattacatttattgtgcactttatttctattattattacattgtaatatatgatgaaataattatacaactcaccataatgtacaattggtgggagccctgagcttgttttcctgccactagacggtcccatctgggggtgatgggagacagtgacaggtcatcaggcattagattctcctaaggagcatgcaacctagatccctcacatgcacaatgcacaatagggtttgcactcctataagaatccagtgccactgctgatctgacaggaggtggagctcaggtggtaatgtgagcaatggggagtggctgcaaatatagatgaagcttcgctcacctgcctgcctgcccaccactcacctcctgctgtgtggtctggttcctaaccggccatggattagtatgggtctgtggcctggggactggggacccctgtgctagactacttgaatctccagagctgtcaggaattctttagggtttgcagccaaccgcaggtcccaacggattgtgtttgggcctgcttcaggctttcatgtttcctgttggcccctgcaggcatttgagttggtggctccaaatctattccagggtttcccaagatgttttctgtggaaaggtttagaggtcaagcaggcacaggagactgtaagtcaaagaaaaaaaaaaaaagaaaaataggggttgggggaatggggagatgatagtcaaagggtacaaaacctcaaacagggggcataagttttttccttgagatgtattgtacggcatggtgaatatagtaaatagtaattattgtatatttcaaaatcatttaagagttaattttaaatgttctaggctgggtgtggtggctcatgcttgtaataccaacactttgggagactgaggcgggagacttcagcctaggagttcaagaccagcctgggcaacatggtgaaacctgttactacaaacaaaaaaatacaaaaattatccgggtgtgatgatgcatgcctgtagtcccagctatgggagaggctgaggtgggacgatcaattgagcctgggaggttgaggctgcagtgcgctgtgatcattccactgcactctagcctgggtgacagagcgagaccctgtctccaaaaacaaacaaacaaacaaaataaaacaacaaaaaaaaacacccccaaaattcaaatgttcttaccacccaaaatgacaagtatttgaggtgatgtatatgttaattaacttgatttaattattccacatggtgctcataaatcatagcatcaccttgtactccataaatatatacaactacacaaaaccccaaatggttttctttgctgtagggcttgtcagagcctgtgatatgctaatttttgttgtacatctccaatatgtggtcatgatatatactctagggtatctcaaaggcctggtgtttaaagccccattttccagatagagaaactaagacctggaatgaaacttaggaagggattttcccaggttatgcagttacctgttacagagctagggccagactccttgctcctgactccatggccagtgctctgcccaggatacctcttcctcttccttcttcctttgtcctcagagaagtgttgtgtgtgctgctgtttcctcctgagagctccttacctttttctggccccctcctgcttgctcccagcattagagggtgtctgtttccttctgggcattgctatgagatggagctatgcctagtttatggctgctgggagatccttctcagactaatagatggcaataaggcttcatcccagctgcagggcccctagcaagttaattccatttcctgagcctcattctcctcagttgtgtaatgaaactcatcatcttgtctgtcttctggagtttttgagaagttcagctctgatatcatacatgaacgtgctctactaattttcaatccatatgcagatatccatgagtctgacagttcttataatttctgggggcagtgaggacatgggaaaaggaggccctggctgtgggagctagcatggttggggccctaaagttctgatcccctcccccggccacagttgatgtctgcttttcagtgtactgctgcctctctctgctctcagttcccctgaacatgtctgaagtgggccggtctagctgactcgagggacccatgtcacaggtgagacatgaaatgaagcacgattttcgagctggggggccctattttcctagtttcctgctgggagttggtgttagagtggggaaacaactcaagtgacttggtgcctcagtacagctctgcctggagcagggagttcccaccagcttctgcccagtcctttgatgcccccacccttcatggagggtggccggtcacctggcttgtgatgtagggtgcacgcgggcatgccgatgcctccatcaacacagcagttaggttcgaaatgctccaggtcctctgctagctgtgggggactctgagtgatgggccagggggtaggccaggctgggttgtgaggtgggaggaggtggtggctccctgtcagagagtgtcctctcctggagggctgtttgcccaagttattcttagcacagactcattatagagtctatttttagccctgtttctaagtgttgccaacatctggtgcagccagcactaaagggggtgggggtggcaggggctactcctttggacatttctggggactggagcctctggcaggagagcaaggacagaatcttctacttcctgcacctgccacagcttgaagcttggcatgcagtaggtgtcctattcatgcttgtgcgttgattgctctcccaggatctcatccttccagctctagctcctgtgagtgggtgggtggtggggatggtgttaccacagctggagaggatgagctgaaggtgctcatcagataggtttcccacatccacccctcaggggtccagttggcctcagacccctgcagagaggcctcagaggagggaggcaagccccaaactatggtgcttgtgacagctaccgctgaaggaggagccagcagacattatagggagggggtgtaccactggggtgagactgcctggggttgaatcctagctcggctctttcctagctgtgtaaacttgggcaactcatcaacctctgtatgcctcagtttcctcctctgtgagatggagatgggagtgtagtgttgtgaggattaagtaagataatactgtatgaactgcctaaatagaaagtgctgtataatagagaggtggtggtattagtagcagtggtagtgctatattactgagaagctccgtatgtgacatcctgttggggtgagttgggtaggagacctctcagcttttctttgagtgagatgaggcttgcagtggggctcagaggaagttgttatagccaggcaccacgacagtggtgatgtctgcaaggctgcagtgggggtcaagagctatgtgctgggttggaatctgggctttgccactcacaggttgggtgaccttggatgagtcacttaatcttcctgaacgcccacttctttatatacaagaaagaaatgataatacctgggtcataggcgtgatgtacgtggagctttttgccctgtactgggagcatgggaggacctgaatccgtgagactttttttttttttttcttaattgagacagattctcgctctgtcgcccaggctggagtgcagtagcgtgatctcggctcactgcaagctccgcctcctgggttcaagcgattctcctgcctcagtctcccgagtagctgggattacaggcatccgccaccacacccggctaatttttgtaattttagtagagatggggtttcaccatgttggtcaagctggtctcgaactcccgacctcaggtgatccacccgcctcagcctcccaaagtgctaggatgacaggtgtcagccactgcgcccggctcatgagacttttttgggagtgggggtgttgctgtgtccctttcccatgtggaggatggggtcctgttgtcttgagagtcttgggaaacagcttggcctggaagttgggagggccagggctgtggtcctagctctccctaagctgtgtggtccgcacatactccctgcttcctccagacttccgcaacatggagaggccagagaaaactgtggttttcagattcttcgtcacagtcccagaaggtgccttgggtactatctgggagcgtgggggaggccctggttggaggccaggtggggtggtcctcccactccccatgctgctctcctgctcctcacactgactcctggtgctccatggagcggcttcatcctcatgttttacatatcaagggtccaggccgactttgtctgaaaatgggagtgctgctgctaacatcaacctgggactttctggtaggtgactcccaggctccttgtcgtctgacattttgtgccctctgacttggcatggactcccggaggagtgccaacctgtatatcagggtctggagtgctgtggtcactggattccctgagggctggagtcccttggggtgtggagggcagaggaggctgcctccagggcctctctggggccgggccgccactcaagggtagagcttccagcgctgccccagtctccccgcaccctcgggatgggggtcccctgaagacaatagtccgtctcagaagcagtgtctcacaggagggaggggtgatatgggcagaaaggccctgccagagtgctggcatgtagtaagtgctcaagaaatatttgaaatgaatgaatggaatgataccatcaaggccgcacctctgatctggtgatgaattttccctcgcctcccttttcttccttctcgcccctgctccctcttccccatcctctgctttgtctgactagccataagctaccccagcctgggttccagattcagccttattcataatctagaacaaagacacttccccaatgtgagttacagtttgttcatctggaaaacaaacacgatgggctcaggttccgaaggccctttggttctcaccgtctcttttctcagggcatgggagtgatttctcagagtaggggtggtagaagcacatgcatacacacacgcacacacacagacacgcacgcacatgcacgcacatgcatgcacatgcacacacacgcacacatgcacacgcatgcacatgcacacacacgcacacatgcacacgcacacacacacacacgtgcacacacacacgcacacacaggactcagtgcagtggtcttggctgggaaaggtccttgccctctgaccaggaaggagccctcggagctgaggtgctcccagactcagcactgtttggggcctacaggatgtggtgtggcccactctagctcaggctggggggttcctgtgggtgtcaggggatgggtggccatccaactgtgtccactgggctgggctgccacagtgactttgtgtatgaccttcagggagtgtgggtggcatgcatcaggacgcctatctgtgtcgttatgactgggcgtgagggagggtgccacatgtctagccagccagggagcagggccagttagctcctgttcctgggtgcctcctggctctggggagaatagaaaatgattcatgcaaaggggccctccctgttttggccacagcctgaggagtaaggtggcctggctgtctgcctttccctgctgcccaccaggtgcctgagttctcccctccttcctcgcctcagaccgcgtttctccctgggggtaggtggctgcccttccctgcagcctgacaccctctcagagacaattagaggagtaggctgcccatgcctacagctataagagtgagtcagcgtagggaccggaggggatcaagtctctctgaatcctgcggccagacggtccctgcaccagaagaagtggcccagtgaggcctgggctgggatgctgtggtcagcactgataccagctgagtggctttccagcttgagaagacctgccagggacaggagaggacaagctccacctgcccaccacccgcctcgccatcctggctgcagccagctggtgactcattctcctggggagtgagccagctcctctcctggggtaccccagcaccctggtgcaggctgggtggccaggagtcctgggtgcctcagaaaacctgtgctgagcccagggccctggtaagctggggagggaggactgaggccctctgtatggggtgggggtcgcagccagacttctcttgctccttctcctggcccccgcagacttcaccctccctctggccaaagaggaggctgcaaccccagattacgtaataggtccaaaatgcctcgcaagcgagcagcccagccagtggctagactcaggagtccccatttcccagtacctgccaccagggcaagttcccattcccttcctaggccgggtgggggagtgggtggtgcttgctcacccctggaaagagctgtgctgcctgggagggggtggggaggctttctccagagacatgaattcttggcctgaccccagatgccagcctgcctgcccagctccactccagagtaacgctgggtgcacacacagccccattgtgtgcctgggccccgtgcctgcccagggcctggcaccggctctatcaacagcagtggctccgtcagctcctcagcagcccctgccagtgcttgagcccttgggcccctggtgaggaggaagagggaggactagtgattaagggtatgagtcctgggtggggtaccaggaccttttggatactatcaactatgagagacaagagcagggagacttagtcctgttctccgaggaggaaactgaggccctgagaggcttcagtaacttgcccaaggcctcatggctagtgagaagcagagccggggttggagcccagagctgtggctgagccccttactggtctcgtcacccaatcccagaccaggactcaggaaaaggcacggtgccctctttccacagccccactttggggagcctctttctcgaaaatatatgtccccagggtagaagaggaccctgagacggtaggatctggagtcctgtaggaccctggaatggtaggatttggagtcctgtgtgcttgtgagaaacatgggggttcattttcaaggatggtgctggtggccagacaggcagagcaggtttccagagctggaggacaggctctgtgcctcagtttccctgctctacctgcactgtacatccactgtgccttctaggaggggatagaaatattgaggtgaggtatggccggggctggggactggacccccactgctgagctctataggctgtgcgaagcccccttcaccaacccagaaccccactcaatgcctcatgatggttctattctaagttgggtctgagccatccacctcctcagctttcccagcctgaagaggcctctgagctgggtgagcctgccaagggggcagcccagctcggtgccatgagggccctgcctctgccgcaggcccatgttcccccacccccctgccaaggtgagggtgcccagacatgacccttttggggcctgccctgtgttttactttccaggctaggcttattcactcagagaggcttgaccccctggggcttgggggagctgaagggctcctcccttctccaacagcccacccttttgttcccctgtctgtcttgggcatgaagcctggctccctccttctacaccacctcagcgctcttagcaaagggacagggaattctgcagtgactgcaggattgtgaaatgccagggctggaccttggggacaggcagggaagagagatgctggaaggggacaccgagactgtgtcctttcataccccacctgggaggccagtctcctccattctgctggcgctcattttcctgcatgtataccattcccacccaccagtcagcacaccttcacctaaggccacagcggtggggacgttgagcccagagggccatgtccgagtgtcctctacctggagcctgtgtgggagaggaggaaaccaagggacagccctcaaggagttcacactgcagctgagaaaaccagagaggtgacttctttgtacctgtttctcatttgtaaaatgagtacagtagtatttcctacttcctagtgttattgggaaggccaaatgaattaatacatgataaagccaagggcctggcactggctctatcacggctttagaagccatccttgatagatggttttacaactcaatacaagttttagtattatccatagtggtagaagaaatacaatatatgctatcaggtgatgatgttttttccaagctggattgtaaaaaccatagggcaagggctgtcttattcatccttgtattcctgtttcagacacagaaccaggcttggaacagagtaagtaattgtgcccaaatggtgattagaggtgggtgaagtcagggtgtgctgtcgggaggaggaggagaccctggagcagggcttccagagaggaggagaagttggataatctgtgggagaggaactgggggagggtctgggggcccagattgggttggcgtgagagagcaaggaggtccccttggctgcacccagtgtttgtttagggagagggatcctgcatgctttggaggcccaactagagcgcttggactttatctggtaggtagtggagagcaattgggggtgatggagcaggaaaaaaatggtctttctatgttgctccatctgtttcattttgtttttgctcccttgttctctgaggaatattttctttcttcatttctccaaagacaataaatcctctctgctcttcagcctcttctttctgatccgtagttacccctgtcccaaatccctgcattctgttcttggcttcttctccttggccatcctggcctgttgtccctgctgtgcttttacctggcttccccttcctttatctggtccctgacccaccttctctggaataggagttgggtggagttggacttgctgagagatgggtactggcatggcatgaccacatggtgggagctggtatgaaggcaactgagccaggaggatatcctctattctgatgtaactctatacatccttcagggaatgactctgccccagttatgtggctaaggcccattagaaggatcttactttatatttgtcaacctgtttaatgaaaatgtagatttccaaaatagataaattagggagtgatggaatcttattttctcgtttataaatttagtggaaagatcagcactttgggaggctgaggcaggagaatcgcttgaggccaggagttcaagactagcctgggcaacataatgagacccccatctctacaaaaaataaacaaattagtgggggcatagtggcacacacttgtggtctcaactacttgggaggctgaggtgggaggatcgtttgagcctggaagggtgaagctgcagtgagatgtggttgcgccactgcactccagcctggatgacagagtgagaccctgtctcaaaaataaaaataaaaaataaatttaatggaaagggatattgaaccagatgggaacgatgcagacaactagtgcctttttcatctccttttaaacatccatccatctatccatgcatacatctatccattatatccaccttttcatccattatatccatccatccatccatccacccaccattatatccaccttttcatctgtccacccgtccatttaggcatgcatccattatatccatccatccatccatccatccatccatccaccaaccattatatctactttttcatgcatccacccatccatttatgcatgcatccattatgtccatccatccattatatacatgcatccatctaatatttattgagcacctatcctgtgccaggtactgcattagatactttatgtttaatccttacagaaattctccagggtggatattgtcctaattttacacatgaggatactgcgaccctgggaatttaagtaagttgatgaaggtcacacagctagaaagtgacagatctgggattcagcttgactaggttcaaaacacacactcttagtgtttaatcaaatggcctctgttggtgtcaccagtgcctagttctaagtgcggaacataatagctgtgttattgaatgaacgggcatgccaaggttctggaatgctggagctctatagctctatcctaggagcagcctgggggcagaaggcaatgctgggcttctagtcctactggcatttgctaccagcaacctaatgttgccatcactacccccggtatggaggtttcttctccatgcaacttgcaactctggcaagtcctgttttcttctctctaccatcccagctctccttctgagggcagtcttaaccttccgccaagtggggaagttccaagtacacatttggccattgcatccagcttgaccagtctccccagtgactggtcttcccctagctcacacctgcctctctccttccctgtagggtgggctagcttgcattactctgacccttttattggtccctatttctaagctttagagttagctattcagtatcaggtcataactgcctcctcagggcccattgggtgaggcaaggatatgagtgcaaacagtttatttgggaggctcccccagggagcaccagtggtagagtaggattcatgagacaggaaggcaaggaagctgataaaatgtgtgtgaaggagcaaggtgactgtgggcatctgaggctcactgccattggaggcctctgcagaatatgctttagagttccccagtcaagtgataggtgtctttggctaagaggtggtggggaagggagggagctaacttcattggttcaggcaccaattcaggtgctggcacctggaaatcttcaggtgggcacttttgacatcgtgagggcccagagcatgtggctggggccctgatagcttttgccacctcatcaagcccagccctgggggtctgccaagccctcttcccacatctccctttctatgtccaagaggcttccccaggcagacccttccccagtcgccagttccacgctcactgtgtttcacagatacttagggagcatctacaaggtgccatggacaaaaagaggaagctgtcaggatgcctccaggcactcacagcagaggaaggtgacctgtgcggctgaggcgcctgccatgtggcagacactggctcgcccatcccaggccttgtgcaaggccagcaatgcccctgtggcatggcatcctctcctagagggaggtacagacgtgctgagcgccacagagcctagagccgtcttccacttccctcccaactctagcatcctgaggctgtgattgtagtggtttttctgacttccttttcctttctgtcactgcgcctgcctcttcccctagccccatggccgccacgtggctgccttttagtcagccgggaactgagcctcctagtagcctccctctgtgtctctgtcaggaacaggatacaattcagggacattttggtgggggagtaatttcgtgcggtggcatacctgtttgccctggcacaggctctgtcatgtctgcttcttggagaggagccttcttcccctgggctccacctgttcccatccccagccctcccagcttcaggctacaggtctcgcaccctatagggctgagggaatgggaagaattaaaagagggaagtggcgtgtaggtaaggccttctggggtgggggctaggggaagggcaggagatggggatggggcaggggctgggcctggcggtgtgcttcccctggagacgtggtcctgggccacaggcaggcacgccaagtcacagcccctctgacttcttcctccagccaccagccccagcctttccccttgatgtttcatttccaaaccaggtctgctctgggtgcgtgtgctggggtggcaggggtaggagtgtgtctgcctgtgccattccctaccctgtgggcaggcccagccatggcagcccgagtctatcatctccccactccgccacttggataggaaggtggctgcactcactccaggcaggtgtgttgttgggaggagaacagagaggattggttcaggcattggaagatggggtttatgtctcaggtttgagctcaagcatcttgggtccagggagaaggtgtaaggcagctgctgcctgagtctcaactctatgggggaaagcagagcagctctgagccttggggctgggcaggcaggagggcatggagcccagatgagtggaagagaatgatgatgaaagagcagacttcccgatgctcctcccccgaccccatcacatgcagagttcaacacaccccactcctcgctctgtcctggtaaaggcagagtgcttcttatggtgtttaaggacaggaaaagggctggaagtgtgtgtgtgtgaattttgcttcctgttcctttcatacctgggtgtgggcggggggagatgggggcaggttgggggacagctcactcactccatccgctgggtgggtgacttggtgggctgttggaatgttgccataggaggccatttctcctctatggggggagatggtggcttccaggtcaggtctcctcctctggctccctgacagagatggggtgggaatgccagccggagcgcacatggacagggcaggagcaaagctgaattctgggtctagggcagctgacagcatttgggaatcctggggtgggcccctgttagctcttcccagaaccccaactcttgggcaggatgggggtgggggggtgtaagggtggttgggggtgggtgtaggtgtgtgttgtgaggggagaagagcccccgctgagttcctgggccactgcctgtgctgtctagtggcctctgccagcactggctgccccgtcctgcccccaccaggcgtgactcagatcgaaagcagaagctgccagacactgcacagggtgaagtgaggcagaaccaactctgctattttggaacctggttaattcccccttctgccccccacctccctgctctcagggctcccatcccctccagctgtctggcacttcagcttcctcaaggggacagttggggcaggccttggtttcccctggcatggacgtggaaggccatgctgaggcccctgtccttgctaggcccctctccctggccagaggtgctggattctggggacctgcgctctggggttggggaggaagagcgccctctcctggtgggaactcgtgggcagggcggccctggcgagatgacggtcaccaggcctggcacccactctcccccgcccatctttggccgctctcaggccagctgtcagctgcctctcccaggggtgtgagctgacgagagcttcaggtgggagcctctcccggcagtgaatctgagggttgggagggatttccggacccagagggaagatattttggggccgagggcctttccagaacccatgaaatcacacaccctgctgcgaccagactgaccctccctagttgatggttcttttttggacatcctaggcctgcttgggattctggccccatgatttagggtttctttggagcccatctgagcctggggggccctgtggtggtggaagaggtccagcctgcggtggtgaaagaggtcagtggatgtgtgtttctgagctgaaaatgggtgtggagttgagagctgtcacctcttcatggacagggtggatgagggtccctggcccttcagaagctgtgtcgttgggaagagggtggactttacagctgtcccgtgtgagtgtacatgggagtgggcacaggccttgcggtatggctgcctctcagggaaccctgaagtcagagctccactctgctgattaccccccagcaacctggtgaggaggatggtggtatactgggggagaggggagtcagcaggcaggtgaccaattaaaatttgggtccttgccaacctcaggtgggcaggacgtaggtttctcattgttcagatggagctggggtttaggcaggtgggaggcagaggcagagccgtgtggaggagagagtgggctcctagacctgctgtgggagcctccacactcccaggcctcctgcggagcacacaggcccaggcacacactgtcccaaaggttgtctgctctcttctggagctgctctttgggcaggcaggcaagtcctggtgcagtgtgtgtgtactggtgagtgtgtatgtgtggacagtggcttatgtgtgagaggtggtgtttgcatgaatgggtgtgtctcatatggtctgtctgggttgcttttccactggtaaccatctcggctttgaagctgtttccccatagacctggattgttttcccctcctgcacgggccagagccccagcacccagtgagccagagcccacctgcagccttgcattctggcctccaccttggctcttgagcctgagaatcaggctgcttaatttccctgtggggctcagaagggccctgcctgtcctttaaaatagctctgtgcttccaccaggggcctgtgcttccctgctgtgttctcccacccgccaccaattttcatgcttggaaccagggaactaagtccccagaaggcaacaagtaaagtgtctttaatgtgcccacacatctcccagggcagtttgttaaaatgcagattctgactcagtgggtctgggcagggcctgagagcctgtttctaaccagcaaacagggcgtgcaatgccttaagaggccctctcccatctaaggccctcactgtccagccagatggctggtggtcacccaggcagggagctagtactcacagaccacctccaaggtgctaggcacatcacatatttcagttccatttaccccctcactgactctgaggaaggtggcattaccgccatccttttgtacagatggggaaactgaggctctgagcggttaagcacctgcccccagtcacaaagctgacaaatggcaaagccagatttgaattctggtctgtcagggtccagagcatattcgtgatccactaagcccggctgtcttccagagggcggactcaggacagatgacgtggtggaggtggaggcggggtcagaggctctgttggggaactgcaagggtagtcctgggtggttttggatggaaaggatatcttgaggggaaggagggttgaatgggagtagttctagaggaaacaagagctgaggggaggctggtgtcctgcacccacctgcttagccaagagccccttcactgatgggctcaagaccccctacctgcctcctctggcactttccagacagactctccacaggggcacccagcacactgtggggagaccaggcgccccagttctgctacctaccaactgtgtgacctcgggcaagttttcagcctctctgtgactcagttgccccctctgtaaaacaggggatatgtgaacgcctccatcatggtggatggagctgtggtgaggattaaatcagtaacacatatcaatgcagaacagtgcctggtgcagagtacgcactcagtgtgcatagtactaatgcctcttggtttgcacctgagagaaaacaggccaccttctgtgaattcaatgcaatcgtccatgctcatagatgtttttgtcctttcttcctccattcccctctccactgtcttcttttgtttaggaagacctggctacttcagttgtacagtggttgtttccaaagtactcagaagcaggtttgactcttaaaaacaaagccagggaatcgttctttacagcagaccagccacagggaggctggggaggctggggaggctgaggcagcagatgacggaggaggagcagccccaggagcaggggcaggagccaggcactggcggggttggagtgctctgaggactttgggcctggggcagggagggctgaggcgggggtggcttaggcactgggaccctgagagccattattagaactcaggacagatgcagggggtcctgggcctgcggctgggtttgggaccaggagccagaagctgctctgcatgcccgctgtgtgcccagctgtggtcgttgtgcctgcctcttctcacacttggagtcaacgagccttccctgccctaagcagctggcagctagcagaagatgctggagtgtggattcttttctcctgaggagatggaaaagcaaaggctggatcctaaggctgccatggctctggagagggagctccccaatgctggggcagccagcacatgggacagtgaaaccagtgcctggcccttcccctcccagcctgcaggccgattccaccggaccagccctccacacatccatgctgccagaaccatcagcacaccaggcaggcggcagggagcctatgagaggtcccacacagcctctgcatgttatttgtgagggtcttgagtcccggagagggggacaggacttgcccaaggtcacgcagctgggtggtgcataccgatgcaggtcttccagtcccactctggccttaggtaggcttttgtgctgggcctgtggaggctgagagagtccttgcaaaacagactcatctcagagagtcagagcttgtgggccccaagtccacaatggcatgaactgaccaatcagatagagtcttaggcctcaccttccctggggagggacctcattgaccacataggctgacgtagcatccatgaaaactttagctgatctttcctgcaggggacatgagcaggttcgctggggtgggccagagggtacttggggcaagtggagtttcagtctctaaacccctctatcgccctcaggcccctttcctgtcctaggagccatctatggctgagtcccactcctcccccaacccttaccaccctcacctcactatggtctggtgccagatctctgatccctggaatcacatttctgtctgaccaactcatatagcctccccttccgccccctccgacccaggctctcgggcgggctaaccgtctcagcgagattcagatttgtcaccctctgagcctcctgggcatggatgtcttggctatttagcaaaaagcatctgtgggtggggtctgggagggctgaggagcatgcaggcctctctggggaacctctgtaggattcgctgagggtgacatgggatgaggggggcgcaggactgggagtgcaggggacaacaagccatctacatggggagacctttcctatgggccccaggttacctctcctgggctggagctgctggtggtcacatacctgagagacctgggcttgaacccccacttcactgtgctcttgcagtgtgacttctgacaagctgcttaatctttcttttttttttttttttgagacggagccttgctctgtcgcccaggctggagtgcagtggtgcgatctcagctcattacaacctctgcctcctgagttcaagccattctcctgcctcagcctcccaagtagctgggactacaggcatgtgccaccgcgcctggctaatttttgtatttttagtagagacagggtttcaccatgttggccaggctggtctcgaactcctgacctcaagtgatccacctgcctcagcctcccaaagtgctgggattacaggcatgagccactgcgcctggcctacttaacctttctgagtctcggtttcctatcctgctgtgttgctgtttatcccatcaagtgtttgtgtggatgaatgtgattgaacagaggccccttgcgcagtgcaatgtgggagggactcggagcgtttgccaagtgggtgataactgagtgtgtgggggtcactggaccagcagcccttgagggccgtgcatctctttctggaaagtctgatgggtgggatggtgtggaggttctgaagaagaaaagtgatttctctgaaacttccttgtagctgaggagactggtaggtggcaaggaaacaactagagaacaaagcatggcagacacaggcaggaggctggagtagatggagtgcccaggaggcgggtgcaggggcacaaggggtgggggttcagtcccaccactccccaacccaggagaaaggtggctgcctgctaaggggatccttagactgcaagcggcagctgagggatgcggctacacgtgtgtgcacatggacatgtgtgcatgtgtgcgtgcatgtgtgtgagagagaagagagaaagagaagcagacacggagagacagagcgtccacatgggtggctgggccggtccgtgcatatcacaggggtggaatccttttctagtttctcctttcatgttcctattagctacatgtccctcgtccctgtcctgccatgcccagtggcagtcgtctttgccagggcccagctggtcccagtgggacaggacagggcgactccctggtctgcaatggcctttgaagctgctccccctgttgtcccgggccaacagtctgaccagccaggaggcgccagttcccaccctttcctgtgggatgtgagctgaaacttggggctgatgggcctgagctgtgggaacaggaggccattaagtgggccaggagcttgtgtgaccgcccttcctctctcctctccttcctttccctcctccccacctcctgctggtgctcagagatttaaaaacaagcccctgactgccccctgcccccagccctgcagtctcccgcagcgcattcctgcagggggtctgggagaggcggtgcagaacgcatcctggggtcttgctctgctgccactgaagcgcattgtgcagatctcccttttggagcctctgcttcctcatgtaattcattctttgtttcttgatctttttttttttttttttttgagacggagtctcgctctgtcgcccaggctggagtgcagtggcgagatctcggctcactgcaagctccgcctcccgggttcacgccattctcctgcctcagcctcttgagtagctgggactacaggcgcccgccaccatgcccggctaattttttgtatttttagtagagacggggtttcaccgtgttagccaggatggtctccatctcttgaccttgtgatccgcccgcctcagcctcccaaagtgctgggattacaggcgtgagccaccgcgcccagcctcttttgtttcttgatctttattcatcacaaataggggttggtcagtcctcagtaagtgtccccacttggcagagcggttccatttcatgaaatatactgaagaccacatcctgcatgacagcctttgtgtgctgttggagaccatagcactcagccatggtgatgcaggacagggtcccggagggaacctgccagggtgatggtgacattctccatcttgatctaaacagtgattatacaaggccacacacctgtaaaaattcattgagctgtacactacaaatctatgcattttgctaggataagttacacttcactaaaagggaaaaagaccaaaacatggcattaaaactgttaaaagcatgtgcgtgtcccattgacctcatttctgcttctgatatcaaggacctttcaatcaaacagtgcacacttaccaggtgtcctgggtttgctatgtttctgtatcggaagttgccagctaatataataaaaggctatattatgaagtatctccagtgtgccaggaactgtggtaaacactccgactacttatcccttagaacccaaaggagtggacattgttattgctcacctgcctctctcatctcctgcagtgaatgacatgatatacaagctctggaaaagaaaatcttaaaagacccaaggcttttggagaggaaacagagggctcctggtaataggaaaagctggcctgaggccttcctgcccctatctagtaaggagagactgaagctggggttaccactaggctgctctgccccagtctgggctttcagatggtgtgtatgtgtgtatgtgtgaatgaatgggtgaatggatgggacactttccccaaaggaacttatgcagggatgcccccagtgggcctggacggagcaacactgaacagtgaccagaatggtgacacctcccctctgcccacaaattcacacctgcaagacaacttacacacccagcctcctcacttagagcacaactgctatgaggtagacgtggccccagctggcaagccctgcttgactgatggggagactgaggccatacccagacaattgagtccagcccaaggctaagacttgaacccaagcacttggcctttcccacagcatcatatgggcaggactgctggctcctgggagtcgtaggatacctttccacccctcactctgtttgggtctgggccatctgatgccccctccccaggccctacagtgactcatgaccacctccgtaatgtggaatggctttgtccatgaggattatgtgatgtccttgttctgtttcctagttcatcaggacttcctctgctgcctcctctgccagagggggctgagaaaaatcccaagtttggtatttttttctctcttcccttccctaggctgaaaggttcctaggaggccacaaagcccttcctttgcctccaggaatctcgaacctgttcaggaagcttttgtttagcggtcagtttctttccccaggactgaccgggcagctcccccacgactgagagtgtaacagactgaatcagaagaaaacttcttccgaccacagaggtgcagagcgtcatcaatggcttaaacaggcctcccagcctctgggcttgcacactttgttgtttcagccgccagacatatgtttttctgggaatacaggaaattatctctgctctttgaggaagggtagaatttttttttctgcctgtgtttggggattccagactgttccatcatcccggacaccctctggctcctgggctggatgaacgagatcagccgctgaaactctttgatcgcagggaggcttcttcagtgagaatttctaaaacaaaacgtggccgccctcaccctgaatgcaggactgaggccaaactcccagccccagggttggggcggtgcagccagactgccagggtccagccttgccactcattagctctgtgaccttcagcaagtgaccacctctctgggcctgtgtttcctcattccttgaatggggacaataatggtacccacgtcactcatatcatgaaataattatgataattacataaggtgctttgaacagtacctagcacacagtaagcattctatgagcattagctgttagcataaaatatttttttttcaattagaaagatatacatcttcattctagagaaagaataacattccaaaaggcttttaaaaccacacaaaatacttatggttacatcatccaaagaagtcagtaataattttgtatatttcctcccaagaggtttttctatacatatttttacattgtgatgatcagattttatatacaatttccccctacatcctacattttgtcacctgacatatcctcatgttatttattgtaagtatagcagtccatcaggagggacacaccgtaatttatttaactatcctataactggacattgaggttagttttgacttttttccatataatgtgaagtgcatctttatgcacaacatccttttctgcatctatgattacttccttggactggtgaatatttttcaaggctttgacatatattgccaaattgcttttccaaagaggttgtaccaaggtatgctctggcagttgtgttgaaggtgcctggtaccaaaggcattttaaagtcatagacacacttggggaagggggggggtttggagaaggggtggtgttggtgaaggtagtttccctaactcttcttttaaactatttaacgtctgccctcattctttttttttttttttttttgagatggagtttcactcttgttgcccaggctggagtgcaatggtgtgatctcagttcactgcaacctctgcctcccgggttcaagcaattctcctgcctcagcctcccaagcagctgggcctacaggcatgtgccaccacacctggctaatttttgtatttttagtagagacagggtttcaccgtgttgcccaggctggtcttgaactcctgacctcaagtgatctggctgcctcggcctgccaaagtgctgggattacaggcgtgagccaccatgccaggctggtctgccctcattcttatgtgattttaaaatgagaatacaacacacatacagaaaattataagttgtaagggagcagctgtacaaattattgtaaatatgacactctcatggcaccaacacccatatcaaattacaaaactttcctaatcctcttacccaccaagccatcttgtgtcccctcccagacactcccccaagggtaattaggatcctgagttctaacatagtagattaatgttgcgtttttttgaactcatatacgcagagcatgctgtatacacttttgtgccttggttctttcgttaacattatgtctgcgagagtcatctatgtcatgtgtaacaacagtgcatttgctgtcattgctttgtagcatttgattgtatggatgtaccaccacttcaatttattttatttatttattttttttgagatggagtctcactctgtcacccaggctagagtgcagtggcatgatctcggctcactgcaacctctgcctcccgggttcaagcgattcttctgtctcagcctcccgagtagctgggactacaggtgcacaccaccacgcccggctaatttttgtattttttaatagagatggggtttcaccacgttggccaggctggcttcaaactcctgacctcaagtgatctgcccgcctcagcctcccaaagtgctgggattacaggtgtgaaccaccatgcctggcccaccacttctttatctatctttctttaatggacatttgggtggtttccagttttggttcctatacacgcaaacattctagtatatgtgctttggtgaacacgtggatgcttttctggtgggcatgcataggagggggtccatgggtcatggagtgtgttttcagcttcctgctccaagttttaaaggatcatttagagggcagaaaaatccccaaggcagttcaggcctcacaagccactgaatggactggcgtcagctgacaatagtttgagggcactgcatgaagatggtactcccctcagaagcccttgtctggggctgtggtagaaactgagtggggccctggccctccagctccaaatgcttggtggctgctggccctggctctgtgcctctgctggccactcggtgtcctcacccagggaccgcggctggcctaatgaccactgcaccgagcagggcagggcttgggccagcccaggtggagctggggggattccttccccttggcgacccacctttggacatgactggaagccctggaagcaggttgggcccccccataaacccccagaagctgctgtgcttcctttctcctgttaacagaatcacacaagtcgcacatattcccactgtaagagctgagtgcttctccagtggaacgaagaactataaaaatccctctttatccctccccctccattgccccttcccactcccctccccagcggtaacaactctgaacagtttggggtgctgggagagcccagaatagtagttaaagagtgggggctgtgagccagcctgcctggatcaaatctccattctgctacttaatcagctgtgtaaccttgagtgagttccttcacctctctgtgcctctgtttcctccaggaaaaatggggataatactagtactcagctcattgggttgttgggaagaaaaaacagaattaacattaggaaaagcacattgaccagccctgacccatggcaatcattcacgaagcatttagcggttggtactctgatcttcctgttgtctacacatataccatttcatgattcatgggctggttcatactaaggtgtaaatgactgacaggcaaggcccacacacagactggatgaaaccagctctggcctgaccagaggagaccgggatccctggttatgaagcgactgccacacacttaccttgaatccccccaatggccccaaaaggcaggtgctgtgattagcaggtgctgcgttttagagaggaagacagcctagcacagagaggtgaagtagctttctgaagtcgcctagccagtaggggcagtgagcctgtgggattacagaactcattttggacatgactaagctggaacccagtctgggctttgaggcagagtcagctgagaggctgtgggtggacagcagcaggaggcagctggagggtcctgggggtgttgatgggggcagccatgtgattggggagaggcagggattctctgggggcatcaaacccttcctctcaggaggagggtgttacctgggaggggcaggggagaaggctctccagggaagtgccccatccctggtgtctacatgcagtaggcactccaggcccccagtgttactgaacctgtacacagtggaccctttccaggcatggtgggtctgaagggccagatggtgggaggggccagggacattttggttctcccatgtccatcctcttagttcttcctggctagactgggtgtcaggggaggctgagagtggaccctcaggattttagagtgagtaggcatgcttggaggctaaggatggggggattagcatgtcctggaccacccccatcgctctctgatcccctcaggtccctcccttaccccatacccatcccacctacaccacactcagcaacccaggctggcgaccagggccaggggagagggctggagcttcactggaggacaagctttgtgggtgtgacagctccagcggtggggttggggagcctcactaccctgccagcctctgtcaggggacagtagctgaggctactgacacccactgatgcacagacacctcactgtgtccacttctccaacgtcctctcccaggaggctcacccagattctggcagggggcggtggggcagggattcccaagtccattgtgcagatgagagaactgaggctggcccagccagtgagaggcagggtccagcccaggctctcctcatagcaaagccagctccagtccacgcgaggccaggccagacgctcagctctttgtcagagaaacaaggggatcattctcccctagccctccctgtgccggctggcactgccaggcccggtgcccacacccccaccagggccaactgaagtcagattgtccccaagggtgggggggtgagccagtgccgtgtgggtgggtgtgtagagggtacagctgcgagggggtgggttgggctggggtcagagcctatgaggtctgtagggctagtgtgcgtgtggtgggcagtgggggtacaaagacagggataaccctctgtagcagcataggaagggggtgggcaaaggcatgggtggaggctgcagctgtgttcctgctgcaggatgggaagggagtggtgggcatctgctcctttctttctggggactgccccgttggtagctgggtggagagacccaaggagctgagacagcccctttactgattcatggtgtagaggggcagagaaggaaggagggtggggtgagggccactgcctgccttcctaccttgtcgggaaggcacagtggtggtgggaggagccctggctggcagtcaggtggcatgggctccattcctgggcctggcagccaggcagcctgcaataagcttcctccctgctctgtgtggagaccctctcctccccagcatgggctcagaggccatgctgcctggggctgggttccagctctgtccctttcactgctgaaagacacttaatctcctgtgcttctgtttctccttatctataaaaggagagtaatatgcagaactacttcatagggctcttccaggtgaaggagtctggaacattgcctgacatacagtaaatgctcaaataaattcaagttattattatttctattatctggtgattttcactgaatatttgccagttctttttgctaatgctgactaagtccagtgtctggtattagccagaacatgtcagcctttgctgcttccctttgctatcccctgaggtctgggcctcattgttaggagcttgagacacagctctggcttctggtccacactgatcagttcgcctgccagtcatgtgcccatccatgtctcatgcactcagcctcccaggtgctacatactgtgcaagacctattaatttcatatagtgctccaatcttctgaagcagagaccgtttactaatgagaaattgactctcagagaggttaagtgacttgcccaaggtcacacagcaaagaagtggcagaactaggattcaagcccatattttctcagttcaaaagtccttgctcaaccacaaagtcatactgcctcttgcaatatccccaagatgggaccctccagcccctaccaggaccttcatggggtctggacacactcaggagccctgcacctctcagagtctcagcctgtctcagctggggaggaccttagaaattactgggtccaaccctttcattttgtgcatggagagatggaggctcagagggggaggggacttacccagggtcacttacctagggtcagtcaatgagctagggacagagtgggccaagctgtaggactcattcttccctgtctttccttccagactgggctggggggcttaagtcacacctgtcccactgagacctgtaggagattagggctgatgtgctggtgggaagtcctctctgggctctggcagtgccaggtgcctggaagtggccctccccatacaggccctcctaagcctgtggacttgcccttctctttattacactgtaggctccatgagctcaggaactgcagttgtatccccattgcctggctcacaaataagatacatttcttcacacatgcattcagcatatgccatgtcccaggtcctgagccagagtcccatggtatagcagtgaaaaagacagaaaatgcctgccctcagggaagtttgcattcccagtaagaaagagacagacaatgaatgaaatagctaggcaaaaatgcattgtatttaagatggtgataagtgatatggaggaaaataaaaacaaaagggaaggggcataggaagtggtggtggagggctttgtaattttaatagggtggtcctagaaggtctctgtaaggtaacatttgagccttggaggaggtgaaggagtgagccatgatgtcatctggggggagagcattccaggcagagggaacagcaagtgcaaaggtcctgaggtgggggcatgcctgggatgtttcggggatttcaaagtgcctggaggatgtagccggagcagataaaacaagagggagagctggcggatggggtcaaaggggaacacgaggtgggccagatcctagggggcctttccagtcatggtaaggactttagcttttcccctgaggaaggtgggaaccatggggagttgtgagcagaggggaagacaggatctgacttaggatttaacaggagttaaatgagttgctctactgagttgccagtagaacgtcctagggcaagccagaggaggcagtctgaacactgggctactcctgcgggattccaggtaagacccaggataggctgggcccaccttgtggcagcaaaggagggtggatatgaggtcggatctaacaggatcaggatgtgggcgtgacacagagaggagtggaagttgactcttagagtttgggatttaccaactgcaatgagtgaagaagacagaaccttcagttttggtccaggaaccaggaaacttggattcatgtctcagctgtcacccgcttgctcagtgaccttgggcaaatctcttcccctctcagggctcggtgtcttctcctctaaaatggatgcggtcccagtcattctggcctccccctgccagcccctgtgctttgaggaggacacgtgcctcatatacctgctgccccttctcatccacagggagccagcgccggcagccaccatggcgtcacgcatagggttgcgcatgcagctcatgcgggagcaggcgcagcaggaggagcagcgggagcgcatgcagcaacaggctgtcatgcattacatgcagcagcagcagcagcagcaacagcagcagctcggagggccgcccaccccggccatcaatacccccgtccacttccagtcgccaccacctgtgcctggggaggtgttgaaggtagggcctgttctggcctgccccccaccctgtccccactagtcccagcctcccctagagcccttgccttttccccctcccaggtgcagtcctacctggagaatcccacatcctaccatctgcagcagtcgcagcatcagaaggtgcgggagtacctgtccgagacctatgggaacaagtttgctgcccacatcagcccagcccagggctctccgaaacccccaccagccgcctccccaggggtgcgagctggacacgtgctgtcctcctccgctggcaacagtgctcccaatagccccatggccatgctgcacattggctccaaccctgagagggaggtgagtgaggagctggccagtggccatgctgcttgcagagctcgtgcccactgctgtgcttctgagactcccagtctaatggcagaggcaggggtgccttcagggagactcagtctgaggtggggacagagcccttctcagggagccccaatctcaggggggaagacacagccctgccctcagggagcctcacagaggaaacgccatccttactttcaaaagctctgctaggaagtcaggtgccgtggctcacgcctgtaatcccagcactttggaaggctgaggcagccagatcacttgaggtcaggagtttgagaacagcctggccaacatagtgaaaccctatctctactaaaatacaaaaattagctgggcgtggtggtgcacgcctgtaatcccagctacttgggaggctgaggcaggagaatcacttgaatcgggaaggcggaagttgcagtgagctgagatcgagccactgcacttcagcctgggcgacagagtgagactccttctcgaaaaaaaaaaaagaaaaaagaaaaaagaaagctctgctagggagaaacagaagacttatccaggaaagcccagcacactccccaagccagagacagaagtgagatcaaggaagctccctgggcaggtaggctccttggcaagaaccgtagcttcatgttgggccagtgggacctggacagctcatctcttctctgggcctatttcctctttccccagataagtaggttgggtgaggtgggctccaaggtccctccaggtcagtggttgtcccaatgcctctttcccctgcccacctcgtggtgggccctccccagatggacttttctcttttccagttggatgatgtcattgacaacattatgcgtctggacgatgtccttggctacatcaatcctgaaatgcagatgcccaacacggtactcctggctagggtggggtgggtgtgcaagggttctagggaggggggcacccactgtggctctgagcctggagagagtggagacagggttctcactgggcagagctggcatgtttctgtagagatgagtcattttcattaaataatgtgacaaaggccggggccaagaggaattatgaagcaagaaggatgtgcctcagcctctgtgcaccatggggcttcagaggggagaaggggctggggacacggagtgggcctgtggggggagctttccaggttggcgaaggggcagagggaggcagggagagcactgcatgggtggaggggcagtgtgtctatgggaaggtgtggaactaatgagctcctttggggacctgggcctcccctcctttaccaaacccagggcccaacaggcaaaagcctgtctgtgtctcttactccatggggcaagtgatctggggctggccttgtccccaaccacaggaacactccctctggcagcttcctgcgtctcctggcagaggtggggtagcaggtggggaggtgctgggcttggagtcaagaagcctggcttctggcttttgctgtgaccttaggaaatccctcaagcatactaaaccccagttttctcagctgcaaaatgggggtgatgctctctacccacaggattgtgggaagattagatgagggaagaaattgagggcaagctctctacaaaggtggcaggtgtgtacgctgggcaggtgggattgccagcgccccttccacccacttttctttggagctcctgaacctcagctacttactcctgcctttgggcatgagcctttcaccctgatcctggccccagcccatgccaccaagggaaagtccccagttcctgtggtggggagtcaatcctctgtccccactgccctggtgacatcgctgagtggcttagtaggagctggccgggactggttgggtccaaacctacagctagcaggggcagcgagggctgaggagggagggaggatgcaagtgattggtccctttagtagttcctgtgtacactgtggggtgtctgggcctgtgatttgttctgcatgtttctgtggcagatctttccagagctcagatctctccctgtcagactcctgcttcaacttcccttggctgcccattccaaaattccagtatctttgcaagtcaaacactgtactggggatccagatacatctgccctgcctacagcacctccacccccaccacttctgcccttgagctgctggaattgtgctctgccaagctgccctgtctgcttgtgccctggtggctgcccggagtgccttgcctcacatctctgctcaagactcagagttccacaccctccaggaaaccgtccagaaactctagaattgattagatgacctgctctagggcttccataatgcctggggcctaatcctatcacatattattggttggatcactctctcagacactctaggccaggggctccttgagggcagggactacatcttataatagctctggactctgcagaccttcaggttgaattgctgggtgaaagggcccaaggtgaattttgacactccaggtgtccccaggaaggactgctcctgggatgataggccctagagggggctccccgtggagagggggatactcatgggtctccctcaccccctaccccacagctacccctgtccagcagccacctgaatgtgtacagcagcgacccccaggtcacagcctccctggtgggcgtcaccagcagctcctgccctgcggacctgacccagaagcgagagctcacaggtactgcctccctctacccctgtgcctttgaatacccgactcctccctccttttctccctccctcccagctcctctctccttctcttttggcctccagatgctgagagcagggccctggccaaggagcggcagaagaaagacaatcacaacttaagtgagtcctgccccgcccctctccctgcctccctcttccttgttctcacctgggctggctaaaaagccactccctgacctgcactggtggaaggcttccctgctcaaggccaattcacttgcagatggcttaagccctcccattgctgtcgctcagtggtgcctgggactattagtgctgtctttccactaggcctctttaggagtgggtaggaaggattcctgtaagggatattcatgaaacccccagtttatcaggttgttttctgggttaaggcatggaacctggggcatcagagttctgtgtagcagggaagagtcctaccccaggcagctttgctgtgctacgagcatcaccatggctgattctacctttcagtgctcttaattgtgtctggcctttgccctggaccccctaattcctgtagaaatcccaatctgttggtcacctcttacttcctggaagaactaaatctaagctgcaggctgccctgaagcacccctccctgggctgggtacttctccccatggggtggggggtccccatccctctaattgctccttctggaatctgttacctttagttgaaaggagacgaaggttcaacatcaatgaccgcatcaaggagttgggaatgctgatccccaaggccaatgacctgtgagcaggtttctgagggggagggtgatgggtctgggtgggcagcagctgacaagtattatctgccctcagccccatgctagttactaggatgggaggagaattccttctagaagttcatctatttgagaaaagatctctccctctcccaaatcaggaaagaatcaggaaagctcaagacagatgagtttctgtcctggaagtgaggctgaggtcaagggaggcttcttggaggagcagtcatgctgagaaagttttcttaaggccattgggctggcagacaagaggccgggctcacgcctataatcccagcactgtgggaagctgaggcaggcagatcacttgaggtcatgagttcaagaccagcctggccaacatggcgaaaccccatctctactaaaaatacaaaacttagctgggcacagtggtgtgtgcctacagtgccagctactagggaggctgagacaggagaattgattgaactcaggaggtggaggtagcagtgagccgagatctcgctactgcactgcattccagcctgggcaacagaacgagactccatctcaaaaaaaaaaaaaaaaaaaagaaaggtaggctgggctggagtcttggtagtctgggaaggaggctgctctgaattgcctggtttcatgagattaatgaagtgggcagtggcaacagaagtcaccaggagggcccattctgtgcaaactgagatcagccacctccacctccaggtctggggttgctgggtaagactgggacaggccacataagctctgcaaccagagcagtagcaaggatttggccactcttctgagcatgcacctctaatttgcctggcctgctgctgcagggacgtgcgctggaacaagggcaccatcctcaaggcctctgtggattacatccggaggatgcagaaggacctgcaaaagtccagggagctggagaaccactctcgccgcctggagatgaccaacaagcagctctggctccgtatccaggtctggtcctgaacttggacttctttggtaactctgacccttaacctggctcctggccctaaggggcagtacttgtacttctgaagttggagacacaggaataatgcccattaggaaggaggatgtatcagttaggatgttttgctttggtaacaaacaatcctcagcatctttaagcaacacatatcagctggaggttctgttctgtgagaccctcattctggcacccacgctgctggcacccagctctctgatggcacatctagagctggctcttaaagccattgtcactcttaaggtgccacatgtcacttctgttcaatgggcttggccaatgcaagcacactctacaagtactctaacctcaagaggcaggaaaatgcaaacctatcatgtgcctggaaggtagagagctggaatcatttggtgggtggcactaggaatctccacagggccaacctaaagaaccaggagcttggcagagtcagccctaccagctggaactgagagttctagtcctggctctgagttgagggcctcttgtcctctttagacctgaggctggccctttacacaaagggcaattggactgcaccttgtttctctttcttatggtagatgacacaatttacattaaaatctagcacacacaggcacaaagtgaaaaatcagtttcatgaagtaacgctcccctcgtccttaatagatgcaatgcattctaataatttctattctagtctagtctagacaagtcaatttcaattaaaaaaatagaaagctggtcaagactcactacggtggcttcacaacccactaatgagttacgacttgtagtctgaaaaaacactggtctagactctagagctaccctatgctttcttccagcggaaacactttgggtcttgggtgccgtagggcaggggcaagtgctgtgatagaggcccaggggaggggtcctggtggctggtgcccataggtgtgttccccagccttctgtctgctcccctgcaggagctggagatgcaggctcgagtgcacggcctccctaccacctccccgtccggcatgaacatggctgagctggcccagcaggtggtgaagcaggagctgcctagcgaagagggcccaggggaggccctgatgctgggggctgaggtccctgaccctgagccactgccagctctgcccccgcaagccccgctgcccctgcccacccagccaccatccccattccatcacctggacttcagccacagcctgagctttgggggcagggaggacgagggtcccccgggctaccccgaacccctggcgccggggcatggctccccattccccagcctgtccaagaaggatctggacctcatgctcctggacgactcactgctaccgctggcctctgatccacttctgtccaccatgtcccccgaggcctccaaggccagcagccgccggagcagcttcagcatggaggagggcgatgtgctgtgaccctggctgcccctgtgccagggaacaggggccggcctgggggctgggagggccaggggcacctccctcccacccttcaggctgcactgtgtgtgaagtagccacctgccctgcctccctcctccccgttggcccctgtttggacttagtgcctgtctggcagcctgtggggtcaggagaagcacccccagggcagccctcttgactggcgcagtgggaagaggccttcagcccctctcccggagatggaatcgcggggcagggaggggcagggtgttctagaggtgagaagagggcctggtggagattccctgtcttctgagcccgagcccctcattaccagtgaaggacatgcttgaggggttcgggaagctcctcatctgaggcaactggtcctgggggtgctcaggcctgcctttttgggactcagatggcaggaggtccaccccgcagcctggtcctcggctctcccacaggtgggcaccccccactttggtgctaatagctctccaccaggtggtgtgagcgcgggggctgccagaagcgggaggggtcactgccggaagagcagctgccctccgacccctcactttgtgcctttagtaaacactgtgctttgtacttgctggtcctgtctctttggagtgggtctagggctgacagcgaacgggaggattcaacccagcgggccccctccagagtgcggatgctgcctgaagggagtcggggtggggggtacagggaagagggaacacgcttgtcacacgcctcagccctgcccggggaagacgaggggtttgggtgctgaggggggcacggtccctcctcacggccacgaggtggcgctgcggccacgccggttccacacctccagcggcggccggagcgagactagttgatgtggcgagagggttgctcacaaaccaagtgcgccgcccttagctgcttatttggggcaccctgggcccggggtggggggcatgcttcttctgtcccacccctgttctgggggtgacctccccaggtgggcggccacccggcttgagaagctgtagctgggcgctctggaggcggcgctcgcgctctgtctgccagacgggcttcccggtaactgaggggctgcgtcctgctagggctctggggaaagggacccccgtgagctagacagggaggagatgggagtccaggacggcgcgtggggtgttatgggcccgggtccccccgccccgctctggctctggcagcgaggcctgggcgcggcctttcctccgagctgcagtccttgggcctctgcttggagacgttggtgtttatgacctcgcctaggagggggacatgggctggggacagtcagggttcgagtggcggctgctcgagccccggtgcctggcgggaacagggagagggcttttcgggcttcatccagttcccctctgctctccacggccgcttcaggcagagaccaaaatggctccccgtcatcgccctgagaggctgaaggggcctaatttaaaaaaaaaaaaaaatcccgggatgaaaatggctaatagggcaatttcctctgtgccgaacgggagatcaaatcaacgttgagcaattagcgtgcgaggggagagaaggaaaatgggccgggcggctgggcgctgatggtggccgggctggcgcaggctgcaggattaatctcaaggtcagatggagccggggatgaccttgtggagcctgagccagccggggcgctggcgcctcctcctagttccaggttccaccccaccacctgggacttacccatgccctggaaacccctctgagccccgtctgggtcaagccctgaactctgtgagacacctgattaactaggcttggcctgccttggccgggggatgaaggctccgggaagtcccaaggccggtccttcaggcccctgagaagtctctcccgaccccactggctcttccacttcaccctggggattgacctagtggagtggagggctgcccacctgcttcctctcacagcccttcaagatcacggatagcccttcctgccagcagatgtctgctaaaaagaaataaatatttaaaacatttttaaaaaggaaaaaaaaaaaaaaagaaaaagatcactgatatccccgcctccacctgcctgctgctttcctgcccctgggctccttcagcctggccactacctctggcattggagtatggactgcatattcgacaggacagagggtgtgagtggggttctgtccacaagagggtgccctgggccaggactaggcagctgcccgccgcggctggtgggggtgggggagtctcagcttcattgtacattccaagctgtctgcctgggtggctcccatcctgcctgggagtcctgcagtcctaccgatttggctgaggccggcccagggactacttccggtatttcaataagccaccagaaagtgttcctgtttctgagaccagcctgaaggaccctcactttgtggctggaatggaatctggctggtgattatgaacgactctgattcaataagagggcaatgcatccttcagcaatatttatttggtggacaacacctttccaagtgtcaggtccatggaggaaattcttttttttttttttttttttttttgagatgaagtctcactctgtctcccagactacaatgcagtagcgcaatcttggctcactgcaccctccgcctcccgggttcaagcgattctcctgcctcagcctcctgagtagctgggactacaggcgcacaccaccacacccagctaattttttatttttagtagagatgggatttcaccatgttggccaggctggtctcaaactcctgacctcagttgatctgccagcctcaacctcccaaagtgctgggaatataggtgtgagccaccacacccggcctttttttttttttgagatggagttttgctcttgctgcccaggctggagtgcaatggcgtgatctcagctcactgcaacctccgcctcccaggttcaagcaattctcctgcctcagcctcctgagtagctgggattacaggtgcctgccaccacgcccagctaattattttgtatttttagtagagatggggtttcatcatgttggccaggctggtcttgaactcttgacctcactcaggtgatctgccctccttggcctcccaaagtgctgcgattacaggtgtaagccaccgtgcccagcctggaaattcttttttaaaaggcagagtagggccaggtgtggtggcttgcacttgtaatgccagctactcaggaggctgaggcaggaggattgcttgaggccaggagtttaaaaccagcctcggcaacatagcaagacccttaactctattttttttttttttaattagccaagcatggtggtgtacacatgtggtcctagctactcaggaggctgaaatgggaggactgcttgagcccagaagtttgaggctgcagtaagctatgatcatgctattgcattccagcttgggcaatacagcaagacactgtttctaaaaaataaaaaggcagagtaaggacattggctggtgtggacacaggagggatgagcctgtccagccccttcattttagggaggcttagagaacaaacagacacgtacagtgggagaggaagcagagaaagaggtcaaagctaagaggacgagaagcagtagctcccttggatccattgtggggccctcggcaggagccaggctgctggggtagcagaggtggtgagggtggaggatgcagacagagccccagcccctgaccctgctgtcttcagctccagttcctgcatctgtctatccccatcagctgctcggcctgcgttagtacctacctcttcagccttaggaagttctgcatgtccaactgcatctgctgggcggccggctccaccatctgtagaacagggcctgggaggctagagttggagtggcagccggggagggggttgcagggccttggaatgtgctgcttggaatgccatgtttccattatccatggttcctttaaagcagagattcttcctttactgtttgacgccattaacttagatgagagtctgatacatgctacacaccttctccccagacaaacacacacatagcctcctaaaaactaacctcaggttcaacactcaagctctcaacccatgccccgtgctccatctcaaagcccatgcccctcccctgtctttcaagctgcctggctcagctgcagccgccagagagccccttcccaggcacctgggtgtacctcctgccccctcacctcctggaactcctacctcttggggcccaggccccatccccctctcagacttctccagcctcatcttttttttctttgctctgttctttccaaggggggcagtggaatttatacaatatttaagcagccagagccgagtctgggaagatattattaatgtaaaagggacgggctgcaaatgcttttggacctggttacaattagagggtgatttttctaaaggtcaatgaattcagataatatccacaggggggagagaaatttaatacctttttagtgaattaattaattataatattatatcggcttggggttcttttccagagtgattaagggagctatctgtcttctgtgaggccggagaccggcgcctgccgccagcgaggaccctggcgcagggctcaggatggggggcccttccctctcctctcacccatgcagtggccaaggagctaggggcttgttaggcatgaaagaagacaggccggacctggtcagggctgagggtggtgcaggtattggcctttccccttggcctgtctcttccacccccgggtctggccctcctgccatggtggcctgaagagctgagatgtggggtatggcctccttctttacacttggagaaactaaggctcacgggcttcagggacatgccttagctccactgtgggttaggacagactgaggtggcagagctggctggaaataccgagaagacaagaaggacctccctaatacctcccaaaccaggccttctggaaaatctccaccagccagaggtctgtggagctgcctgggaagcttctccatctccaaaagaggctctttcagggtgtatagtgtgcccagcctctgcttataaaatgaaaatgccccaggagtattgatacctccagttgctgtgaggcctaagatttctgtccctggagggatctgaaagtggccagggagtggtgcttttcacccatttattcatttattcatactcagtcaaatgttcattcaacaaacatttgtggcacacctgctcttgtgccatcagagagacctaaatatcacctcttgagcccctgcccacttcatcttaagccccagctgctcatctaagcaatggagggtggggtggggagagctccgtggtccctttctgtccagacaacagtcctaactcaacctgaaggcgagaagactggctgggatgcggtgggtttgtggagcaaagtgggtgctcattcactcagcataccctgagcacccactttgagctggccctgtgctgggtgctggggatatgtgggtggataaaggccagctggtcctggtgacagagtgggcacagggaggcagatgtgagcctgcaatcatgattccgtgtgggttcagcaaaaggagtagaagtgacattaagctgggttgtgagggaccagactgacaaggggagagggaaggcgcatggaaggagagggaggggcattctaggcattggacacagagtgtgcaaaggcctgacaaaggggggtacctgcagattagaggagatggtgggacagtagatgaggccgagtgggcggccacctttgtccccacccacgggcccaggcatgttgacaggaagacaaggccataggtcgggtccaggaaggcagggagcagcaaagccaaatagacttgcttttcttcccttgtttttgaggcagggtctcgccctgttgccctggctggagagaagtggagtgatcatacctcattgcaacctcaaattcctgggctcaagggatcctcctgcctcagccttctgagtagctgggactacagacacacaccaccacacctggctagtttttgtattttttgtagagattaggtttcactatgttgcccaggtggtctcgaatttatgggctcaagccatcctcctgcctcaacctcccaaaatgttgggattccaggcgttagctggtgtattgcacgctgggcccagattgcatttaaacgttggctctgccatgacttgccatgtgatggagcctccctgtgcctcagtttccctatctgtaatgggagattgcaatgtctacctcctaaggatgttgtaggaattaaaggaacgactgaagggaagaagtcggccctgcatttagcacatgatgtggctccagatatcttagactgtacatggccctcgagagggtgggtgggtcagggccatgccttctattgtgcccgaaattcctctttcctctcaagggggtgccagcaaaggccctaccctggggacatttttttggggggaatatcaacattttcctcccctcatggctcagccccatctttccccactccctgcctctgtccctcttctcccttcatgcaacatcccctccaccctgactcccccgcagcagcctcctcccccaccctctcctctctctccatgtgcggcgggccggggagggcctttccattgtactatctttgggccctaaattaaaattgatgacatcttgaaatgagcagtgagggtaattttgcttctgagccgggatgctaatgaggccccttaatggtgcaaacgcggagctgacgggtcgtgtgtcacgcgccgcagcgaggggggtaatggccgcggtaagtgccggtaattacaccctgtcttgctgtattttggcaggcctggtgggagagtgggggctcaatcaccactggcgggggcaccccccacccagcacgggactgacagccagagatacccacttccacccagccaggcccctcgacttcagcctcacctagaatgaggggcctgggcacagcccccttgccccatgcacacatggcatgcaaaacacatagtcacacatgccacagtcagaccattgtgcacccccacccccactccacacataactccacagcctgggcactcccccggtatgcacaaagcacacgcatagacacacacacacatgcacactcacccgttatgctcccccatacacttctacactctgcagatacacactgctccatatacacagcctgcacagcacacacacatgcacgtgcacacaaatacattctcaaagagcacacacacgtggagcgcctactgtgctctatgagctctatgtctgccaactctactcccaactcttctgaaataggtgttattctcattttatgacacagaaactgagtcttgggagatttagcaacttgtataagatcacacagctaggcagtgacagagacaggactggaatccagctgtttttactttgcaacctttccagcccccatatttcctcctatgtatgcatgcatatacacctctcactgcacaaacacacgcatgcatgcacatgtgcacagtcatcacccacagatcacgtagatcctctgtgcacccaaagacgcatacaaaggcattgttcaaatacctacgcgttgctgacacacatatgcaaggtgtgcttggtgtgtacacacagatgtgcacttgtgtcacatggtgtttgcacccctcacacatggtgagcaggatatcatggagaaggaagcctagattcctacatggggaactaggcatatagcctctccaggcttcggcatctcaatctctaaagaaggggaaataaacactactccacttccctccccagcacttaactgttgttaaggcagaatgacagccacacaaaggactgtgacgtgccctcctacaaacccccggcagaatcacacactgggtgcacgtatatgcattgtatgagtgtgcatgcactgtccaagtggcgtctaagctctctgtacatacaacattgtatttagacacatctctgcacacacactgtacacatgctgtgaatacacatcacagcacctgtgcagtaccctaagcgtacctgccagtgaaactggaaaccccacaaagcccatgggtacttgtcatgtgtatatactacatcccttcctcctccccccgaaaagtatgtatcaattctatgattatggtagaggttaaaagtatagactttggcgtttgaccgcctgggctctgcatcactttatttgctgtgtgacctcaggcaaattacttaacctctctgtgcctcattgtcttcctctgttaaatggggataataagagtgcatctgcctcaagggatgctgtcagattaaatgagttgacagatgtaaagcacttagtgcctggcacgtagtaagccccagtgagtgttgtgataaggtgtacaactacaacaaaggaacatacctcggggtgtggcaagcaccaaggagcaggcagtggaaggcagaggagggaacactcatatacggctggggcagtcaaggagggcctcctgtaggaagagggattagggctgagccttgaaagactgtagtttcgtttgctgagttcctgctctgtgtcaggccctgtgctacgtgctttatatgaattatcccagtgagccttctgcgaaccctgggaggtgaccatggttatgtccatgttagagatgaggaggaaaaggtgcagagagactcggtaactcgtccaaggacaacaagggcctagataagagaaggagaagaggcacaggaattccaggcgggatgtgcagcttgtgttggaaatagagcaacagatgggaaacacacccagagggccttccttgctacactgtcatagtttccagttaatgagaagggggtgagcatctggagtgggggctgacctaattgctgtgtctcttgcagtgacaacagggacttgtggggggtgggagtggctggcactgcccacagcatgctcagggcaggggccagagctgggcatctgattcacctcccttgccccctcccccaccaagagccagggcctgacccagttcgggaagaggtgggtgctcccgcttaggccctggagaccaggcctggatccctggaaagggacctggacaggtgagaagcatggaggagttggtgaggggtcagtgagcaaatctctgcccactccaccctgaagccagcaccgctgcaccccagggctggttcctggagatgcctacatgaggaataagctgtgggccaggacactgaggctcccctcaaaccggccttaatatccctgttgcctcatgtccattaaactgtgcagggcctgacaagctcattcaccaccccttgaagagatcatagattttttcccctcagtgtttttcatgggctgttcctatttgtagtgcagttcttgacattcagcaaacagctccccacaaatagcctcctgtcccccaaccccacaaataacctctagccctcctcacccacacacccacccttttatcttgctggcatagagaaggtggggggctaggtggggaaggaggggaagggccatggcttccgaggcccgggacatgggttggcatcccacctcctccccttcctagtgtcggggcttggggaagtcctccacccttatctctgtgcctttgttttttcctctttggtcaggtggggacaacaaggcagcctcccaggctggggtgtctctggggttggtgtgaatcacatccagcaaagcacttggcccatgctggggtgggggtgttacccaaggagggatcacagcatttattgtccagatcaggagactctgaaagtggaaggggacattattaaagatcacaccagggcaacacatgacaactgggactgtcttgggagcagcaagatgagtgatcactggtctatgaggtgtctgtagcctttctgtccatcccgcctggtgggatgggctggggcgtctgtgtacacacatgtaatggctagggctgggccaccttggggaagcagaacaggctgggtgcggaggtgtatagagaggtgggagcagtctcaggagccggaggtgacatcctagacacaaggaaggtggagctgttgggagtggcccccaaggctagacagaggagaggaaatctgagggtgggagagtagggtggggggactcaaatctgcagacaggcttggaggtatgaacaacctccattccagatcacagtgacagccgccctcgtggagcacctgcttggcaaagaaggcactgctctgagtacttttcatgcatttgctcatccaatccccacaacaagcctatggagagggtactatccttgtctccattgtacagaggaggaaactgaggcacagaggggttgagtaactcgcccaacgccacactgctaggaaggaaagagctgaaatttgagcccaggcagcctgctcctgttccctgggggccctcc

SEQ ID NO: 226 - DNA, 2176 bp, Homo sapiens
cctggggctggggtgcggccctgggctccggcccctggaggagctgagcattccaggggcctccttccagggggctgccctctcgaagggagccagcgccggcagccaccatggcgtcacgcatagggttgcgcatgcagctcatgcgggagcaggcgcagcaggaggagcagcgggagcgcatgcagcaacaggctgtcatgcattacatgcagcagcagcagcagcagcaacagcagcagctcggagggccgcccaccccggccatcaatacccccgtccacttccagtcgccaccacctgtgcctggggaggtgttgaaggtgcagtcctacctggagaatcccacatcctaccatctgcagcagtcgcagcatcagaaggtgcgggagtacctgtccgagacctatgggaacaagtttgctgcccacatcagcccagcccagggctctccgaaacccccaccagccgcctccccaggggtgcgagctggacacgtgctgtcctcctccgctggcaacagtgctcccaatagccccatggccatgctgcacattggctccaaccctgagagggagttggatgatgtcattgacaacattatgcgtctggacgatgtccttggctacatcaatcctgaaatgcagatgcccaacacggtactcctggctaggctacccctgtccagcagccacctgaatgtgtacagcagcgacccccaggtcacagcctccctggtgggcgtcaccagcagctcctgccctgcggacctgacccagaagcgagagctcacagatgctgagagcagggccctggccaaggagcggcagaagaaagacaatcacaacttaattgaaaggagacgaaggttcaacatcaatgaccgcatcaaggagttgggaatgctgatccccaaggccaatgacctggacgtgcgctggaacaagggcaccatcctcaaggcctctgtggattacatccggaggatgcagaaggacctgcaaaagtccagggagctggagaaccactctcgccgcctggagatgaccaacaagcagctctggctccgtatccaggagctggagatgcaggctcgagtgcacggcctccctaccacctccccgtccggcatgaacatggctgagctggcccagcaggtggtgaagcaggagctgcctagcgaagagggcccaggggaggccctgatgctgggggctgaggtccctgaccctgagccactgccagctctgcccccgcaagccccgctgcccctgcccacccagccaccatccccattccatcacctggacttcagccacagcctgagctttgggggcagggaggacgagggtcccccgggctaccccgaacccctggcgccggggcatggctccccattccccagcctgtccaagaaggatctggacctcatgctcctggacgactcactgctaccgctggcctctgatccacttctgtccaccatgtcccccgaggcctccaaggccagcagccgccggagcagcttcagcatggaggagggcgatgtgctgtgaccctggctgcccctgtgccagggaacaggggccggcctgggggctgggagggccaggggcacctccctcccacccttcaggctgcactgtgtgtgaagtagccacctgccctgcctccctcctccccgttggcccctgtttggacttagtgcctgtctggcagcctgtggggtcaggagaagcacccccagggcagccctcttgactggcgcagtgggaagaggccttcagcccctctcccggagatggaatcgcggggcagggaggggcagggtgttctagaggtgagaagagggcctggtggagattccctgtcttctgagcccgagcccctcattaccagtgaaggacatgcttgaggggttcgggaagctcctcatctgaggcaactggtcctgggggtgctcaggcctgcctttttgggactcagatggcaggaggtccaccccgcagcctggtcctcggctctcccacaggtgggcaccccccactttggtgctaatagctctccaccaggtggtgtgagcgcgggggctgccagaagcgggaggggtcactgccggaagagcagctgccctccgacccctcactttgtgcctttagtaaacactgtgctttgt

SEQ ID NO: 227 - protein, 475 aa, Homo sapiens
MASRIGLRMQLMREQAQQEEQRERMQQQAVMHYMQQQQQQQQQQLGGPPTPAINTPVHFQSPPPVPGEVLKVQSYLENPTSYHLQQSQHQKVREYLSETYGNKFAAHPAQGSPKPPPADGVRAGHVLSSSAGNSAPNSPMAMLHIGSNPERELDDVIDNIMRLDDVLGYINPEMQMPNTVLLARLPLSSSHLNVYSSDPQVTASLVGVTSSSCPADLTQKRELTDAESRAKERQKKDNHNLIERRRRFNINDRIKELGMLIPKANDLDVRWNKGTILKASVDYIRRMQKDLQKSRELENHSRRLEMTNKQLWLRIQELEMQARVHGLPTTSPSGMNMAELAQQVVKQELPSEEGPGEALMLGAEVPDPEPLPALPPQAPLPLPTQPPSPFHHLDFSHSLSFGGREDEGPPGYPEPLAPGHGSPFPSLSKKDLDLMLLDDSLLPLASDPLLSTMSPEASKASSRRSSFSMEEGDVL

SEQ ID NO: 228 - DNA, 38920 bp, Mus musculus
  misc_feature (1)...(38920): n = A,T,C or G
ctaggaattttgtaactatcagggaaaaaaaaatacaagaaatctttgtgaagtccagaatgaactcccaaggtcatctaaccacaagttccctgagctcacagacctgagctgtctttctccttgcagtgtgtgctgttttgtatgcagaagaaactatgttgccagggaaaaacagaaagtagatttaagggtgctgagcattttttgttcagtgtcgtctttaaatttcttctgttcatttagattctttgatgtgtctgggtcttttcctcggatttatgtgaaattcttttagtattacttactagtagaatatatggtgggtgtgtgggggtatgtggtgtgtgnnnnnnnnnnnnnnnnnnnnnnnnnnnnnnnnnnnnnnnnnnnnnnnnnnnnnnnnnnnnnnnnnnnnnnnnnnnnnnnnnnnnnnnnnnnnnnnnnnnnnnnnnnnnnnnnnnnnnnnnnnnnnnnnnnnnnnnnnnnnnnnnnnnnnnnnnnnnnnnnnnnnnnnnnnnnnnnnnnnnnnnnnnnnnnnnnnnnnnnnnnnnnnnnnnnnnnnnnnnnnnnnnnnnnnnnnnnnnnnnnnnatctcatagatattctcagttttcttcattgtaggtaacaaatataaattcatccacaacacttgagccacaaaaaaatgtcagtgttgacactcctcagggtgccttggaccccaggattccacacacatttactcttatcaagatcatttggaaccatgtcatgaagagtcaggaatgatagaatatgggggtgggggatgttctggagcgatggctcagtggttgaacacacttgctgttctagtagaggatcagggttcagttcccagcaccatgatggctcacaaccatctgcaactccagtcccaagggatttgatgaggaaactgggcaggcaagtagtgtacatccatgcatgaaggcaaaacacttacatataagatagatagatagatagatagatagatagatagatagatagatagatagatagataatagatagatagatagatagatagatagataatagatagatgatagatagatgataggtagatagataatagatagatggatagatagatggataaatagatggatgaatagttagataatagatagatagatagatagatagatagatgatagatagatagatagatagatagatagtagatagatagatagatgatgatgatgatgatgatagatagatagatagatgatagatagatagatagatagatagataaatcgatcgatagatagtgtcccctatcactcttgacaggatgtttctggtctatactattgctttgctttgaaataaaactcctttgcttctttgcaatttgtttctgcctttattttagttttcttgaataaaagtctgggaacctggaaacaccagatccaagcaacgtctgctggttactactggttttgtcccagtaatgggtgcaagtatggacatttgagcctctcgtggccagcacacacatctggttctcccttcatggcagtttgatctcccagaaacatggggagaattgcctaagtcttttgaggtttggtcttttgctgtgtattgtagggctaagtgcaagcccctaagacctggttccctgagagaaagtctgagtgtagacccagtgactttgcacccaagttatttctcattggtaaataaagatgctgacaaccaatagttggacagaagagacataggtggggtttaggattccaggactgggggtctgaggaaaaccatgagggagaagaaggtgaaggagggagagagaagccatgggttctcgagggagaacctgagggctgaccaattggagttaagagcagcatagatgaaacatagtaaataataacttggggttattgataggaaggtagattctaatagcatagagggtaggtatctgcccagctcttgtgctgattaaggcttattgtaaatataaaggttgtgtgtcttttatccaggaactgaatgatcaaggtgatagagaaaccccagattgggattaaaaaatttcaacaacatatgtctggtaggaagaatggaaggatgctgctaacatgactcaacccgctctgcagcccccacagcagagcaagcaagcacctgcagcactggagacagggcgtggtcctaaggaaacgctacgtgtaaccagctgtcctcagccaccaggaataggacgtgtgttagtcacttttctcctcgctgtcacacaaaacctgacatgagcaacattcaggctgggtctcctcagttacacctcctgcaaatatcctttagctactgtggtggtctgaatgaagatggcccacataggcccatacggagtgccactaaagaggtgtggccttgttggagtgggtgtggctttgctggagggtgcgcgtcactagggggcgggtctgaggagctcaagctggggcttagtggctcaaggtctcttcctgatgccttcggatctggatatagaatgctctcctcctctcaagcaccaggtctgcctacacacggctgtgcttcccaccatgatgataatgaactaaacccctgaaactaagccagcccagagtatgttttccatcatgagagctgccatggtcatggggtctcttcacagcaagagaacccctgactcagacaggtatcttgttatatgagcctttaactttccccttagctgaacgggttttctttgcttgtttttctgtcttgtttcatttttatattcctaagatttatttagttatgagcgtttgcttgcatgtatgttttgttcactgtgtgtgtgtatgtggtgccattaaaagccagaagagggcatcagatccactggaactggaggtacaggcaattgtgagctgccatgtggatactgggaaccaaaccttggccctctacaagagtagcaagtgctctcagtggctgagccatctctctagacgtgtgtctttgaattgtttaaattacacttttatttagtggggggaggggtgtacttgcttgtcacctagcatataaatcctcagcatcccataagctcccggttaattggagtctccgttacttgcaggtgtgaggaggatcttgataggttagagaagaagaaacctatgtcttctacctgaactctttaaaaaaaaaaaaaaagacaagacccaaggctgaggagatggctcagtggttaggaacactggctgctcttccagtttcaattcccagcacccacatggcagctcgaaacagtctgtaattccaggggatctgacaccctcatatggacatacatgtaggcaaaacaccaacgaacataagataaataagtctnnnnnnnnnnnnnnnnnnnncccctacccacccactccccctttttggccctggcgttcccctgtactggggcatataaagtttgcaagtccaatgggcctctctttgcagtgatggccgaataggccatcttttgatacatatgcagctagagacaagagctccggggtactggttagttcatattgttgttccacctatagggttgcagttccctttagctccttgggtactttctctagctcctccattggtgttttgtttcatatttatatttttaagatttatttagttatgagcatttgcttgcatgtatgttttgttcactgtgtgtgtatgtggtgccattaaaagccagaagagggcatcagatccactggaactggaggtacaggcaattgtgagctgccatgtggatactgggaaccaaaccttggccctctacaagagtagcaagtgctctcagtggctgagccatctctctagacctgtgtctttgaattgtttaaattacacttttatttagtggggggaggggtgtacttgcttgtcacctagcatataaatcccagggagggaccaaactcaagtcatcagactttttagcaagttctcctacccactgagtcaactcagcatcccataagctctgggttaattggagtctctgttacttgcaggtatgaggaggatcttgataggttagagaaggagaaacctatgtcttctacctgaactcttaaaaaaaaaaaaaaaaagaagaagaagacccaaggctgaagagatggctcagtggttaggaacactggctgctcttccagtttcaattcccagcacccacatggcagcttgaaacagtctgtaattccaggggatctgacaccctcatatggacatacatgtaggcaaaacaccaatgaacataagataaataagtctttaaaaaaaatacagctctgacaacacctggattttcaccttcgagccccattcagacttccagaactaaagatgatagattggtgtatgtggcagggcatcgggttgccttgtcttgtcttgtctctcgggactggggattaaatcaaaggcattatgaataatagccaagtgttctatctctgagctatatcccctgcctttttgttttgttttgttttgttttgttttgttttttgttttttgagacagggtttctctgtgtagccctggctgtcctggaactcactctgtagaccaggctggcctcaaactcagaaatccgcctgcctctgcctcccaagtgctaggattaaaggcatcccctgccattttaaataaaaaaaatatacatttatctaatttgtttttttatttttgccccacggagtgagtttggaggtgagatgacgattgtgaggaatcagctctctctttccatcactgcggatcccagggaaggacgttaggtcgtcagctcagtgacaagcgtctgtacctctaatccatctcgaccctgccctttgcagtagccatgtctgtttgtcaacttgatgatacccggaatgagcaatcatccagaagtggaggacatacctatgggagatgactccgctggttttgtagtggatgaatctacttctagaccagctttgaggtgagatctggatcttgaggtgggaagacatacctttaacctgggccacaccctctgctggaagtctatggaagaggacgacataggaagctttcgttctttgcctgctcaccctcgcctctcgagcacatccatcccttcactggcgttagcgccgcctacttctgcgggattccggcagatacaggagatcagctgagacatccagccttgtggaccaagcaaccactggattcttgggctttatgttcatggtcaattgttgtttgattagctggacaacagcctctctctctctctctctctctctccatatatatatgtatatatatgagatagatagatagatagatagatagatagatagatagatagatagatagatagagaaaagtagatagacagagaggggggagagagattcattctataagttctgctctagagaaccgtgacgaatacaccttcttcttaaccttcttcttcttcttcttcttcttcttcttcttcttcttcttcttcttcttcttcttcttcttcttcttcttcttcttcttcttcttcttcttctttttctgagagatagtctcccatagttgctcaggcccttgggcttcctcttcagcacaaatagctttgaattttctctcctgtctcagcctccagtagctggattatagtctgttgccaccaggtctggcttactagcattattttgacaccactaattttgtgttatagcatcaatagaaaaaccagctgaatctagtcaatgaaaaacccaaaacaagacattagcataggtgccaccagcaatatctgcagaagaccacggactcggagtggagtccagcatctgctcagtacaccaagcgaatgtcgggaaagttcaaaggcaggacctgcaaatcattggctcctggagaccctgaaatggactgagcagctaactattatatctgtgtgtgtgtgtcagttctcttgctctgcagacaccttcagaattcagcgctggctgccgttcttagaacctgttctgttcttggagctgcgtcattgttgtattgttttctttgttcaactaaactctacttcctatgataggactaaggaattcttcctttcctcaacacaattatatcaataattaaatatgaaatgtgtggacccagctactaaataccagacttgtcagaccagatttgtttaaacttcagctatgtaccattcatgagagatattgttcagaggtaattccaccagagaatacacagagagtctgttttttaaaattaattttccatcttgttcactgccaccctcctggtcatcccctcccacaatccttttccccatcctctcaccccctcctcctctgagctagtggggaccccctgggtatccccctcacccaggcacatcaagtctctgtggggtttggcacaacctctcccactgaggccagacaaggcagcccagcagaagagcatatcccatgaacaggcaacagcttttgggacatcgcccgttccagttgttcaggacccacatgaaaaccaagttgcacatctgctacatatgttcagggaggcctaggtccagcccacacagttactcttaaagcacggtagaaggattgccagccagtgactgcaggggaactaactcaaatcatgaagcccaagatgctctgttcttgccctttatgcacagacatcacatcctggttgacacacttcacttagcaagaacagttagtgaaagtagaactatagaagccaaaaggcaaggttaggacatttagggacttccccagatcctgacagtccagactagatcttcaatggactagttctttggcagctgtgggggcctacgtgctgggctctgaagtcaaaatggtgccactcacatgttccgttgtgctcaggtctcaggtctagttcagtacacttaaaacagaacaacactaaacggctatgggaacccttatgcctgtagtctcggttaactggagtgtgacacgccacccccaattcagtgacctgcagtcgtagccatttcgcttgcataagggcagtgatttgaactacattcagacatcttccactggggcatctaagcagacttaatacagcaggcctctggccacagcctgcctgcagttcaacctctcatcctcaaggatgctatcccaggtttctgcacaagggggcagcagcgtgccagtggagatgctcagcaactacaaatcttccaagaaccagcctccgaaatcccaagttgttgattggaggtcagagggggttaaggacaccagaagaagatggtccgcagaatcaactaagcagggctcgtaggggctcacagagactgaaacggcgatcatggagcctgcatgagtctgtgcagggccctctgctcatatgttctgctggttagcttgggagtttgtggacttgtaccagggaaagttgggtgctttttgcctgcccctgggacccttttcctcggctgccttgtccagccttgataggcgggtttgtgtctggtcttattgcatcttgttaagccgtgttcagttgatatccctgggaggcccgccctttcctgaagggaaacaggagcagtggagctggggaagagggaaggcggtggtggggactgggaggagtggagggaaggaaaactgcggtctccatctactgtgtgagagaagaatagataaaaaggaaagaaaagttaaaaccaaacagaacgcacctgaaaagaaagaaaggaaaggaagaatacaaaattccttctttccagctggcctgaagtcggagacagtctcatgggactgagttctcatcccgtggggtctaatgctatagccatgcagaagggtcagaatgacgatgtcccccgccccccaccccaggcactgctgtagtgtgattgcctgtgtgttagtgggagaaataccccccacacttaggattacagaactggactgtgctgtgagagtactgtagaagactgtgggcgtggcctgtgtccctcccccccacccccaccgcactcccattcaccagtagagctcataaagcatttcttttattcatagaaatctatttgttcttaaatacttaatgaatgtatgaaaggaggtatatatatagagagagagagggagactgacagacagacagaccaacaggtctgagctgctgacacactagctcaatctgttgagggactaagggatcagctcgttatcaacagccatgttcagccaaacttagaggcatctaaaggtctccacgcaccgcccaatccaggggggtagagcaggaccgcaccagcagtgggaaggccttgatgggatcggagccctgagtagatgctgttttcctctgattccatggcacaaataagctcctgtatacggaggaaagaggtggcacctgggagcagcctgatgtttgatcttgattattaacttgatgggatttacaatcaccatggaaacgagcttcctgacacatctgtgagggagttgctagttaattgagctggggaggcccacactaactgtgggtggcgatagtctgtgagctgcctgcctttcaggctgagtaagaaggcgactgggagctgaacatcagcactggtcagcatccagcttgcctcctgcccgttgataccgtataacgggctgcctcaaactcccgtcgccatgacttccccctcaaactgggagccaaaattaacccctttttgttccagcaataggcaaagcagctaaatacaaacaggtacagtctggaaggaccaaggatcaatatctggaaggccccagtcaatcggggactgatcaatggcagaacacatgggtaagaggggaactgtattttcttaacactgaagtcatctgaataatgaggcttgcccgtggtaccctagaacagtgttttatcacatagtccaaagtagagggcatctctcacagtgattatacaaatgtatcttagtttgaatctagagtgttcatgtcctcaaattctatgtacagcctcacgtcgtttgattgcatcaattaaaatacagggtaactaccactctgtcctctgtaggaagtgtcagaacatctgctggtttgcaagcagcccctccccttggtgtgacttcttcaacttcttaactcctcccccttcctccccatttaacagcacctgaaacaagcctgacacataggtcataagtccctgcattgcctgggttttgtttacacccatttgactactggtagatgggaaacataaagaaggtttgagttatttaggtaccaaacaatgttctggaaggaaatgcttcaataaatacttagctgaaacatgccaagtgaataatcaaaaagataaagctgtagaaaggggcaagggtggtggagaggaaacaagaaggcccctgccaggtgggtgagatgcttgctgagagcctgtccaagtttggcttacaccagcagagcttttaattctgagaagaagagactgtcaggctgcagacaagcgagggtggccatgagagccacgagggagccactaggaattcttctattctgtagtctgtattctgggctcaaaggcctgagaccgtttcttctccctcgcactgacttctgtagttcactccctttcagttctcccaagaattgtgagtcctggagggtaggtggtccttgccctcccctcttcctcactacgtttcctgccccaaggcaaccttggctgaggagcctctagtctggcaggctctggggtgctttgaatgtgcttggcctggggagtggcactattaggaggtgtggccttgttggaggaagtgtgtcagtggggttggggaggactttgaggccctcctcctaactgcctagaagacagactgctcctgtcttcttttagaacaagctgtagacctctcagctccttctccagcaccatgcctgcctgggatgctgccatgcttcccaccatgatgataatggactgaacctctgaacctgtaagccagccccagttaaactttgtcctttataagaggtcttggtgtctcttcacagcaataaaaccctaaataagacagacacctaggaccatcttcacctgtaaaggtcttcacatgtgggtggcttaaaacatgcaagggtggggattgtaggtttatggtgacatccatctgtaatcctagtactgaggtagaaggatagagtttgaggctagcctgagctacatagcaacctgcccaacattctgggtcacaaagtgatttcttgtctcaaaaacaaaaaccaaataataaaatataaacaagacgtgtgaggggacagggacattctgaagctccatggcagagtttgcctagcaaactaaagaccctggttcaattcccagtggaggggtaaagagctcactcagaccagtcctggacacctcattcctgcccactactactaggcgccagggctgcctagctggaccaggcctcagctgcatctcaggtctagccaatcacatctgcaggactgggccagacctccgtgctccggaggagactggatgcagcgtgttcattgcctcctgtgacggcctctgtgtgctcctgttgccttcagtcctccttgtgctcaaagtctccgattttcaaacctttattctcccaacacaatgtttctttagagacagggcagaagaagaaacccgaaaagctgaaagcccagcgtcctgcatcttacatgggcccagtaggtaccagagtccagcttctaggtgttgggaggatgctggccatgtcccaggaggcgggtctgttcttgggctttgatccctgctccggcgggcccgcccgccctgtgtgcaggggcagtgtaagtagtctcagactctagagctgccccctcagggtggcaggggattgctcagctctttgacctctggtaacctaattaactaggtggccaacaggagactacgcagatcacaggtcgcagatcgcatcactccaacctcccgattacctggccaccacgttgtgggcagaagagtcctgcctgctggccatggaacgccgtgtgagagtgaagtcttgggtagaagagaatcgggcctcctttcagcctccggtttgcaacaagcttatgtgagtcgccagcacccggtgactacaacccaccctctttcttattcctcttccctcagctgtcccctccccctctagccttgcgttccatccacttggtgctcttctggggagggtgaaaacgacctgtttcttctttcactacctcagtatgttcctctttctggagaccacagacttgtggccatgacttctgagaccagcttgcgtgtctctgaggctgtgagagatgagctggcagggtgtgacattccttccgcggctgaaagcacctttccaacccactgcccccatgcaccttggggagagcctggtgttcaatgccccagactagaacttaaggcctggagacctagaaccaagcacctcaacccttggcaaaccccgaagctatggagtcagatgaacaattctttggatgagtggacttgaattcccaatcttcctgcttctatttcccaagtgccacaacaccctgtttctgaggtgctgagggaagaagtcagtgaatgctaggctcccacttttccaaacggagctgcatccctagtcctggggattcttaattcagggctcaaggccaagacacaaacaccagacccacccaagtctcctctaactacagcacagactgcctccgttcccctccccctcccctccctcagttccacagcagagcttcttgcaccacctccacagacccgaactccccgtgtctgtgtggctataagttatttccaatgggcagtgtcccaacccaaatggctccagacacttacaccccaatgggaagactagccaagtatatcacatcgtctccttgacttctcacatagccccccatgagttgggatttaataagtaactttcccaatgtcacagagctagagggggacagagtccatgagcaagcccaggaagagtttgactacaaagtccacgcatgctcttggtcactgcgcaatacccccgtagctaaccaggaacagccccnnnnnnnnnnnnnnnnnnnnccccccgagcctcctctcttctgccactgctgctttcctgtttggagctttaccatttttgtctctcttctccacgtcttccctgtctgctgtctctcattttcactcctcccagccttcctccctccaagcctgtgggcatttctctgattccgtccacatcagcctggttagaagcaactgcctgcccagcctccaggcctgcttacccccacgcccaccccacccccagcagactagcctctagaactcctcgagttcgccatcatgatcctagggcctccctttattcagtcagtcggtatttgctgtgcaccacgatgctccgacactgggcttacggcaggaggcaaactgaaaaaaaaaaaaaaaaaaaaacaccttccctgtagaattgttgagaggggacgccaatcagtatgaagtagcccatgtccctgagaggacagttttcatggcgagtctgtgccatgcctggccctagcttctctggtactttgctggtatcagtggtgttccttggtttcaacgcatgaacccagtgtccactttcgtcctcacagatgctctcccgctctgagtctccgcatccaaagtcccactcttaaaacctcacatactctgcattgagcaaaacataaagcagcagggactatccacccttccttgtcaggactcctgtttcctcaaggcatcctctctcaggttcacacccactctcatacgctatagctgtgtgatgtgacatatatagctcactccattataacttactatacccgcagcagccctgtttctgagtaagttcactctctgaggtcctgggggttaggactccaacacaagaatttggaccagtgtggggtattcaaaccgtaacagcccccactgaggcaagaatctcctggagggctccgagcacaggaggtacagggtctggcttgtgcattctggctggaggtcatacgtgggtatagttttcaaatgggcttactcaagaactttctgaatgtgttctaagtatatctcagtcaagtctattaataaaaaaccaaaaaaagaaaaaaatggctggagggatggaccaatgggcagggcacttgccatcacagacctgaagacctgaactgactcttaaaagttgtcctctgacctccacatgtactgcttataagagcctcactgaaagaagccagggcaggaacctggaggcaggagccatggagaagtgttgcttgctggcttgctctccatggcttgctcagtctactttcttacagaaccaaggaccaccagcctagggatggcaccatccacaatgagccaggtccttccccatcaatcaataaaaccatcagtctggctcataggccaatctggtgggggcattctcttaatttcccaaataacataaaagtatctaacatataaatacatttttaaaaaccnnnnnnnnnnnnnnnnnnnntggtgttccttggtttcaatgcatgaacccagtgtccactttcgtcctcacagatgctctcccgctctgagtctccgcatccaaagtcccactcttaaaacctcacatactctgcattgagcaaaacataaaacagcagggactatctacccttccttgtcaggactcctgtttcctcaaggcatcctctctcaggttcacacccactctcatacgctatagctgtgtgagcacaggaggtacagggtctggcttgtgcattgtggctggaggtcatacgtgggtatagttttcaaatgggcttactcaagaactttctgaatgtgttctaagtatatctcagtcaagtctattaataaaaaaccaaaaaaaaaaaaaaagaaaaagaaaaaaaatggctggagggatggaccaatgggcagggcacttgccatcacagacctgaagacctgaactgactcttaaaagttgtcctctgacctccacatgtactgcttataagagcctcactgaaagaagccagggcaggaacctggaggcaggagccatggagaagtgttgcttgctggcttgctctccatggcttgcgcagtctactttcttacagaaccaaggaccaccagcctagggatggcaccatccacaatgagccaggtccttccccatcaatcaataaaaccatcagtctggctcataggccaatctggtgggggcattctcttaatttcccaaataacataaaagtatctaacatataaatacatttttaaaaacccttgccaggcgtggtggcacatgcctttaatcccagtactcaggaggcagaggcaggcggatttctgagttcaaggccagcctggtctacaaagcgagttctaggacagccagggctatacagagaaaccctgtctcgaaaaaaaaaccaaaaaaaaaacccaaaaaccaaacaacaacaacaacaacaacaacaacaacaacaatcccttatggtaggtctggagaagactcggtggttaagatcacagactgctcttccagatgcacgggggcaggggaggcctgtggtatggggtggacatcaacaatgaggatatcactaacaatttccaggcctttgtgtgggagccagccttggttcgtatcaacgctctgacaacagcttctgaggctgcatgcttgccttattgtgtcagtgaatgagactatcaggaacccctcctcccccacgctgccccactgtagatgctccagcagctggccaggcagaggccaaggccgcttccactgagaggcagtctgcacacctccttgtgaggtgaggcgggggtggggtgagaaaatggttgatcatctgctgtgttctcactggaggttatttaaataaaacttaaggtaaaaaaaaaatcccttatgaaataaattaaagctgccttgctagacaaggaaactaaaccccagtaaagtcaaccaccatgcccaagattgcaataaagctgaatcagtcttgggaggtgttttgtgctttgaacacttgtcagacacacatctccttgccccattcctagatgtcacagtctcctgagtcccctgagtatggtccttagaggtgaagagtctcacagtagacaggctgagtcacccgagctcttgagcatggcccagggtcaccgagagccatgcttggctgtgttgtgtctttgttggtctgaagacatgcagacgatcaaacatggtgacacgttaatgcgtgcggaacaatgtgggtgggggagaccttctcctctcagatacatgtatcagacctcttcctgtccccacaggtccctgcttcccccatccttcccaggagctgactcgggttctcttcttgcctctccactgcaggcaccaggagcagctcaaaatcatgttcgttggaggccccaataccaggaaggattatcacattgaagagggtgaggaggtaggccaggctgctcactcttgtcacctgctgccacccggagggtagggggagtagacacttcctagacgagtcctagggctacagcgagtggcctggactcccatgggaagggaaaattgttgccttggaattggggttcctgccttgtgcctggggatcctgactaaggaggctgtaggctccccacctcatgcctacgtggtggtatctctccttcaacctgaatatgtgattgaccctcacaggagacacgaactctgagggactccatcatcctttgatcccagaatcaggttctccttctccttcacacaaggagcaaattgtctgaggacacaacaggtagaggagaaatggaggacggaaaggaaccggggaggtagagcatgggcagtgctgaagaaagagttgggactgggcgggcccccaactgctaggacttctatgacgcagagtctggagactgaattctgtacatttacacttgcttactgaagacacacaaacacacacacaggcacacgcacacacacacatacacacacatgcacacacacacacatgcacacgcacacacacacacgcacacacacacacacgcacacacacacacatgcacacgcacacactctcgcgtgtatcaaaaatttagtgtgatggtgcacatctgtattcctacactcaggagggaggcaaagagggtcaggagttcaaggagaactaggctgcaaatgaaaatatgtctggaaggaggaggaagaagaagtagaagaaagaggaggaggaggagaaaaggaggaaaagaaaaggaagagccgaccctcctgagcgacacagacactgtatatatcaggattgctgtgcgctaggcaaagactactgtgaattgtttcttgttttctggaagacctggttctagggtttgggcctccacccctctcgctgacattcccaacacaaacttaagaccgctcaccatgaagccttgagaattgctctgccggcaaatactaagggcaacagagcagcaggcagaggataacaggcctgcagcaacggtctgggctgagcacaaccagttccacacaccttgaccttctcctggccgtcgaacacctccctcaaaatgggtttcctgtgatggaaaaatgatatgaaaatctaaagtacagagagagagagagagagagagagagagagagagagagagagagagaggttagagctgagtggctgtggtgactgaggcccaggtggcctttactgattggcaagcagactcatccccactcaacaattaggcctgctgtcagtgtccaccctgcctggcccccattgcctagctccttcttctctgcccttgctcatctcagggtctctctgtgctgctccggagcatatgtctgttccaactggtttttatgtcagcttgacacgagttagagttatgggagaggagggagcctcaattgaaagagtgcctccataagatctggaaagctggcccagcccactgtgggcagtgccatccctaggctggtggttctgggttctataagaaagcaggctgagcaagccgtgggaagcaagccagtgagcagcacccgtccatggcctctgcatcagctcctgcctccaggttccttgcctgttatgaaaacattgataactctaagtaaaaccatgcccatgagtcctgagccagtacatactgcaattcagctgggggctaagagatgagctgggctggctttgatgaggagcgatacttggtagctcagagaagtctggctataggtaggtttgtgatatttggatccactttttagtaggaaggcagagtttggtcttcctgagtccctgggcagcctcgagcaaaacaaagtgtcagtatcctctttgtccttgcctgtcctgacgcagagcctgagcagttactctgagtgatgtttaaagcgtatctggcactgactacactggatttcacatctggctgaactctggcctctgtgatagcctttaggtgccctgaaccaactcaccactcaaacccactttttctggtggttgccaagaatgaaggcaattgactgagaaggagaagttcctctggctagtcatatgactagacaggtccatatcccatacccttggtctgagccttttctcgtaccacatgggaccatagctccgcctgtggaaaagacaatgtgtacagaataggtacttcatagctgtgggtccctacctattgctggctcccctacctgtgagtcctttccaggtcacagaagccagactcaatttaatatctgtgtgaacagtacacttaatcttccagctagccctaggtctcaaacatcatttccttcccatgaaacataattcctttcggattgcctggggttattgatgatcttctactctgctgtcaggggtatgtccgctgctgcaggccaagcctgcccctcatcagagaggaagtctctgggcaatcccactgctgccttctagttttgatcaatggctgttaatatcttttgtttgtttgtttgtttgtttgttttgttttgttttgtttttgagacagggtttctctgtattgctctggctgtcctggaactcattttgtagaccaggctggcctcgaactgaactcagaaatctgcctgcccctgcctccagagtgctgggattaaaggtgtgcgccaccacgcccagctaagattttttatgggggtgagggggctgttaatatcttgttgtcagcctggaaatggtttgaatctggccccttcctcccatgttgatatttgcagcccctcctcgtaactccgaggtccctcctctaccattccaccatgaaaggactcaagacttatactgaggagtggtcacacacacacagacacagacacacacacacagacacacacacactcaattgtttcctatgaagaaatctactaggttttcttggtttgtattaaataacatataaagtgcgtgtgcgtgtgcgtgtgcgtgtgcgtgtgtgtgttttctagattaggctcagaacctcatacatactacataatgaacatcctgatgtgacgctgcatcttcaatcatacggcttgtttttaataatgaacgtaaacaccattcattgtagaaaacataggaagtatagccagctttccctcatagccatgaactctgccacctatgctatatatggactactctgtaattaggatcctctgtgaataatttctcttcttcttcttcttcttcttcttcttcttcttcttcttcttcttcttcttcttcttcttcttcttctccttctccttctccttctccttctcctccttctccttctccttctccttctccttctccttctccttctccttctccttctccttctccttctccttctccttctcnnnnnnnnnnnnnnnnnnnnctcctcctcctcctcctcctcctcctcctcctcctcctcctcctccttcttcttcttcttcttcttcttcttcttcaacaagatctcactccatagcccagactggcctcaaactcaaggcaatcttcctatcaactagagacataagtcatatgcccagctcataaggtactggttaggattttaggaaagaatagaatatttagtaggagccccctagagagagcccagtcactaagtccatccacctaggcagtcaactgccacagcccagtgccagagcacctcagtagctggagggatgtgcagggccccagagctccccaggccaggatcccaactgcagctccaagattcaccagcatagacaagctgctctgagcctcagcgtccttttcttctcagaatcaggccaatgatgctaacgctaacgatgctgatgctaacgatgctgatgctgggcttgtaagattcccgatgtgcatgagaaaggccagcctgagttaaggaatatctccactgctgtgtcgctgggttctttggcaagcttcttacccagcatccttcctccctgccaggcacctgctgcaccctgaggatcccctactagttccagatttgcatatagacccctgtacatctccaactttcttgtctgtggcctgggccagggggtccaagggtttcagagcaggggtgctggggctattcataagccccgaggccttcgggaagctattccggttttccggtcagagttcaggtcctgggtagaagttaaggatctaagaggcagagcagggaggtctcaggtccttggttttcccacaggtgttttaccagctggagggagacatgatactacgagtcctggagcaggggcaacaccgggacgtgcctatacggcagggagaggtgaggctgaccccaaagaaagcagagggtggccgagcagaaacccacccctggtcattttccctgcccatcctcagggctcccccttcctgagcacagctcaacattccctctgttttcctatagtcttaggatagaggctggcagagtgtaggctccagggtggacatgtcaccttgaggggttgtagcctcgctggtctcctgttctctactcctgcagatattcctcctgcctgccagggtgccccactccccgcagaggtttgccaacaccatggggctggtgattgagagaaggcggctggagagcgagctggatgggctgaggtaattgctcgtgtgtggtgggggcttgggccatcaaagagctaacaacagagggcatcattcaaaagtatagcttgaaggatcgatgatagactcaagaaagtacttcctggccactaagagactagaggacttggcaacaggaggcgatggagaccctgggtttgctgactgaccagagaggggagagtggcttggatgaggaggggagggagtggtctctgcagtgcacatgaagaagcagaagcatgcttttgtgcattctgcaggtctgctaggacccttgtggtggcgaggggtgactacagacagggagactagaggaacccaaaagccacatgtcctggtatgggcaaatactgcggctgctagcagcctgggcctacagaaattgcccttggcttatgtacttgtgtttctaccccagatcataacaagcatggacatctggccagcaacatctgtgttccaggcgccagctaggagttgctgtgtgtgtttgttatcctattctcacccgtgatactggctagggctgggtgaactactggtcctagcagtttttgaaactctggggactggacccagcacattgcacatgctagagctatgctctgtcagttactggagcagaaccgaggcccaggtaaagaaactcgctagatgaggcattacagagacgtgcagagccagcgggtgctggatcagcaagggggaaggaccagccctggagggctccccttccccatcagtgtctagatcagcagttctcaccctttcccaagggccgcctaggaccataggaaacatttaccctacaattcataacagtaggaaaattccggtcatgaagtagcaacaacataattttatggctggggggtggggggtcaccacagcatgaggcactgtgttaaagacttacagcgttaggaaggctgagaaccactgaactagactattaagctctgaaaggaggaagtcctcgaagcccccaaaccaaagatttttcttcaagtgtgctttgagttttcaaagaaaactttaaatttctcaataaattaccagaatcaaaattctttgccggacaccttctgtgatactgggcatatttaaacactttctctcttttttttttaaagatttatttatttattatatgtaagtacactgtagctgtcttcagacacttcagaagagggcatcagatcctgttacagatggttgtgagccaccatgtggttgctgggatttgaacttcggaccttcggaagagcagtcgggtgctcttacccactgagccatctcaccagccccctttttttttttttttttttaaatgagtcaaaatcatacacattccctctcaaagtctggaaacatgagaatccgaagtgaactaaattaaaattacctgccacttaagggaggattttatggtttgtgaatttaattttattcctcccatgcctcccgagcaaacacataattaaaacgcagaaacaaaagtcctttgtcgggctccagttagacacgaaggcatggcctttttcgttcatacctcccctcacaaccctccagtcttgttacatgcatgnnnnnnnnnnnnnnnnnnnncacattgcacatgctagagctatgctctgtcagttactggagcagaaccgaggcccaggtaaagaaactcgctagatgaggcattacagagacgtgcagagccagcaggtgctggatcagcaagggggaaggaccagccctggagggctccccttccccatcagtgtctagatcagcagttctcaccctttcccaagggccgcctaggaccataggaaacatttaccctacaattcataacagtaggaaaattccggtcatgaagtagcaacaacataattttatggctggggggtgggggggtcgccacagcatgaggcactgtgttaaaggcttacagcgttaggaaggctgagaaccactgaactagactattaagctctgaaaggaagaagtcctcgaagcccccaaaccaaagatttttcttcgagtgtgctttgagttttcaaagaaaactttaaatttctcaataaattaccagaatcaaaattctttgccacacaccttctgtgatactgggcatatttaaacactcttttttttttttttaatgagtcaaaatcatacacattccctctcgaagtctggaaacatgagaatccgaagtgaactaaattaaaattacctgccacttaagggaggattttatggtttgtgaatttaattttattcctcccgtgcctcccgagcaaacgcataattaaaacgcagaaacaaaagtcctttgtcgggctccagttagacacgaaggtgtggcctttttcgttcatacctccccctcgcaaccctccagtcttgttacatgcatggttttaagttttgctgtctttagttttaaaaaaataataataatgctggagccaacgagccctctcagtggaaaggcgctgcactggctgccaagcccgagggcctgagtttgaacctggaatccacaaggcggaaggcataaacttgaaaattaccttctgatctccacaacccagatgatggcactcacaccagctccccatgtaagaaaaaacataactgtgaggtactctagacgctacaatttacccagtttacataacggaagtcacatgcccactggaaaattcacaagtatttctcatactgttaaaaattccatctgtgtgtgtgtgctgctgacggctgccccagtccatggtaatggcctgttgaataggcagatagtgggacttaacttttcataggagtctctctgaggtgctttttggaggagactctagtgagttattggtgccctcagtaacattttacagcaaattcaataacggattcatctggctgcttttgacctttaataaaaggcaggaactcggcattaaaatgccgccccgaagaccattcctgagggcacggcagccccatataatgaagctttctggtagccagctccgcctcaggttaggagccgaatggctgcatgatttgtctgcagcctctgtctccagagaactgcccctgcctttctggtgagagtcaggtgagcagaaagaaatgggctgatctgaaactgatgcagggattaggccttctggtgacagttgttcccagcacctgccttgcgtaagggtcagaggtgcctccagttgtgtaagggtcagaggtgcctccggttgtgtaagggtcagagatgcagcacagctctgcctgtccaggtgctctctgcccgtggggacatgggtggcaagggtgactgaaggctgtgtgtgccagagaaagccagagatgtactcaagttctaagcagcagatgtgacctcccacctccaaaacagaagagtccctcatgggggtgggaggtgtagggggtcagggagtgggaggtggggtgggggtggggataagggattgggggtgtgtgctgcactggctgctgacgtttctttttttttttagatttatttatttattatatgtaagtacactgttgggcgtcagatctcgttacggatggttgtgagccaccatgtggttgctgggatttgaactccggacctttggaagagcagtcgggtgctcttacccactgagccatctcaccagcccgctgctgacgtttctgttacagtgacccagagcccaaagaacagacagtagcccttccggctgcccgtccaagattcaggctgagcttcaacttctttttgctgaaaacaaatccacttggattgaatgttctccagtgctctcccagcttctgtcttgagtgtagcttgctccaccacatacataggctgtgtaacccctgccgagtcattctgtttccgagctcaagttctacctgggttgcacacacccggcgttaaatgtgatcctaggctgtgccaacagaaagtaacaaacacggcttagctatgcagtgcctggactcagcaggaggccttcaagcagagcccagcctgaaccaggctgccccaaagctgcccagatggagagtgggctcccttgacctctgttttcacaggtattacgtgggggacactgaggatgtcctctttgagaaatggttccactgtaaggaccttggcacgcagttagcacccatcatccaagagtaagttcccattatgggcccctccctcaatgccccatggcctggagccatcaggggtgggagtttaaaagaatctcccacctccaggatgggacgagccactctgcagggtcgggaggggaagcacgatgaagtcctgtgaggggctatgaacgtgggctggctcctgcgtagggtatatacctcaccagcatcttaacagaaatgctgtcgttccgtcctctcgcctggtccctgcaggttcttccactctgagcaataccgaacaggaaaacccaaccctggtgagccccctcgcttttctccctccctctttctctctagtgggatgggtcttgacgtggtcccaggagcctcttcctgaatcctctgcctagtaattaaagtactgagcagacaacaccaagtagcaacctgtatgcctgccaagtcattcggctgcacccaaatcccgaactggccttgagttaaggcttctgggtcccggctatactggggctgggtggcctgagcctgaaggtcactctccatcactgtgtcactggcgcagaccagctgctcaaggagctgccattcccgctgaatacacggtccatcatgaagcccatgtcattgaaggcctggctggatggccactccagggagcttcaggcaggcacatccctaagcctgtttggggacagctatgagacccaggtaatacagctcagggcactcaacagccagccagccagcacctgagaaatgggaatcaatatctctctctgtctctctctgtctctctctgtctctctctgtctctctctctctgtctctctctctctctctctcacacacacacacccacacacacacacacacacacacacacacacagagaaacttcagaggcatgagaacggccttcctgttccctctctatctccgagattaacagtgttgctgtgactgaagttctctgggtgccttcatggtcgcaaggatgctttgtgtacagagtgggaggttctatgtccactgtcaccttcctgggaatcgcttacctcccctgggcttttgtcacgtgggaacttggaagctgaagagggagctatttggcagaggctgggcagcaatgtgttagagaacatacaagctggcctttcatctagaattcctgctgctctaggctttggtaagaacaagacagttgctatggacaaattaacccacaactgccagtcacgtgacagctcatttactagagaaaaacagaaagtcataggagaataactggaggaggtcatgtgcacctagaatgtttgattaaaaattttagatttgtttattttattttgtgcttatcggtgttggcccgcatatgcgtacatcatgtgcttgcctggtgcccgtggaggccagaagagggcgttagaccctctggaactggggtcacagatgcgtatgaatgtactgggaactgagtctggggtctctgtgatcttcaccacttagccatctctccggccctgggtagaattgtaaagctagtgtaagggtttgcaggagggaggtggagggagtggtttggaggaggaagaaacataaaggtcagaagaactgaaacagcctagccctgtaagcagccgaggctggccagagctaggtgggaaggctagcaaggaggctggactgctagctgcttccagaactctgctgcactagactaagggaggggccatgtcctagagacatcggggcttcgcccacatgttgggggagaagtctagagtgaatttcagagccatcagcctttcattgtgatgttgggccagagaacacctacaaggatgctgctattcgcatgtgtgatgggtttccaatggcacagcctgtcaccaggagtcagcgagatggctcattgggtcaaggtgctatcttagggttttattgctgtgagcagacaccatggccaatgcaagtcttataaaggacatttacctgggggctggcttacacgttcagagcttcagtccattaccatcaaggcagaaacatggcaacatccaggcatgatgcaggcagagctgagagttctaggttgctagcagaatactggctttcaggcagctaggatgagggtcttaagcctacgcccatagtgatgcacctactccaacaaggccacacatcctaatggtgccactccctgggccaagcagagacaaactatcagagatgcttactgtataagcctggcaatccaggtttgatcactgagacccacaaaaacgtggaaagagagctgatgccacaagtcatgcatgtatgaccacatgtacacacatcatacattcacatataatgatgatggtaatgatgaagataatcatgatgatgaaaaagaagatgaaaaggaaggagaagaaggaagaggaggaggaggacaacaacagcaacaagaagaacaagaaggaggaggaagaagaggaggaggagaagaagaagagggaagagggcaaggaagaggaggaggaagacttaaaagttaaacagtggtcactccagggcaggaggctggcagaacacaggtttagactgctcttccagtactagggacgcccaaagctccacccaccacagccgtagctaatggcttcttcctactctgtgtctacctgctctagctctcctttgccaattgccattaacccctccttacagcctgcaggagcgcaggctctcgctaatcataaggccagcaggccccagcctcatgttctccccagtcagacgttgaacacttcacaggaagggcagtggaaatctgggggcccgggttgggtgtgtctgagtgtgagctggtgacacccatgagggcgtgtgtgtgtgtgtgtgtgtgtgtgtgtgtgtgtgtgtgatccctttctgatccctgacgagtaggctcgtcacatggggaggaggctgtggaagtgggcacatcttgtccctcgaaggtgataatggttaagggccagggttgtgactatttcccaaatggagcagaatcccaaaacgctctgctttgtcttccccaggtcattgcccacggacaaggtagcagcaaaggcccaaggcaggatgtggatgtgtggctgtggcaacaggcaagtgggatcccaggtttgggtggcaccatttcctgtccatgggggttggtttgtccctggacctcaggctcccatagtgagagttactctcagggccttcttgcgaggcagactcggggacatgaaagcgagagttgaggcctgatgtgcccccagcctcttctgtggttttgtagtgttggggatggaacttatggcctccttataagagctctaccattgaacaccccctgcttccccgttcccacacccaccatgcatgtactcatgtatgtgcacacacacacacacacacacacacacacacacacacacacacttttcttatttcaatgcagggttttgctaattcactcaggctggccttgagctcagcctcatcagccttcacttggttctgctgttctctcacaggagggctcctctaaggtgacaatgggagggcagtgtatagccctggccccagatgacagcctgctggtgcctgctggaacctcgtgagtatatgccaggactttctgaagccatgacaatgatgcccttttccctggaacccttgggctctggccttgcctgactcttatgtatctgtgtccccacaggtatgtgtgggagcgagcacaaggctctgtggccttgtctgtgacacaagaccctgcccgtaagaagccatggtggtgaccctcctgtgtgcgccccaagcagccacagggtgcctgagtaatgacctggtagctgcccatttccagacagctctttcagcctcattgcatctccatggacatcagcaggccccttgagtggttgagagctgtcactggcatcaaccctcctgcctagctcagcccaggatgccagactcctaggacatcagcagtccccgatcttctaacagccatagccctacactgtccccatgtgcccagcagcctgacactaagaaatctctcaataaaggcatcctgctgaatgagtgcttgcgagttttaggtggcagacctgtgttcccctgtcatgtgttacttggggacaacagttgccacagggagttagaaggcctgttaatgtgtgtcatcacctcttgtggataggtggttccctgtgcatgcaaccctgatccacacccgctccgcatcctgcttataaagccgcgtgcttctttgtctctccctctgttccctgttcattcatttagttgttaacatacttaaaaataacaacaaacccccactctgctgagtttctttctcaaccacagaagttatgttatgctaattatggaaaacagaaatacctcaaacacagagttccccacccccagaggtaaccactgtcatagcttctacaagtggaggaaaggcaagtgggacatctgtagctcagagaaggacttcagcaagaggcctgtagcactaagcctgcatctgcacagagcaggccttcctgggcagcctgggctcagggagggacttcagtgagaagctgacaatactgagcctgcatctgcacagaacaaacctaggcttagaggcagagcttcaagaaaagggaactagagcccagtctccctgccctagcctggtggctcactgctctgacacactccacagaaggtcaaaggggacctgacttggctgagggagctttctggccttgaaggatatgacatcagcaccttcctatcccaaagcttttctataagcaaagaaggaccacactggtgccttcaaatgtccactgtccagggtggcctggtccgtgcttggtggcaccagtgtgtttctctgtcccagatctgggaagagaacatgccatgtctagagatgctggggggggggggggtgtcagaacacagaaggaatggctccatctgtcaggaaaggacaaccaggcttcctcattttctcttcaatgctctccacaaaggtgacaataacacctgattttacagaggacaattttcttaacatttaaaatatgccccccaccaccccccagccatagcgagaaagctgtaaatcccagcagctgccatttgaggtaggccagacatgtagctgaatggcagaaggggaaacgggacgtgcttcagagacacgtgaggaagcctgggcttctgagaaggttgattagaacagtggtagcgagaggacgggagagccgtgcttccctgaagaaaagacttaacagagcaattgggcctcaactccacaggcaaccgcagcacagatgggaattctgggaaggaaatggcactgcgtcatcaatggaaaacgcgtccctccaatccccttaacatggcttaacaaacatctacctccctagccacgttagccaaggagttgattgcccttcccagctagaatgctaggtctcccccaagtcagagagtgcattttcttgaccagaaggaaatagtttcccctaaatgggcgttactgctactgtgacgctgatgatcagggtgcctcggtgggggcctctgctctccagggctctgggtctttcacatgggatcgaattccctctccatagtcccctggggtgggggtcaatccatgttagacatgtttgaatcacacaggtctcagggtcagagccaggcagaggcccaagagagagacattgtggagtggaaaacaggggaaagcaggcaggatggaggccagacaagagacaatggatgcacgtattttgaaaccagtgtgcatggtgcctctacccacttcccactttctgaaaactcaccagtgatctcagaggaaagccagatggcaggaagggctgtgggtcccctgcccagcctccaggtcacccctgtctgtccctggctgcctttctgtctgcactgccttctcctgcacctgccccctcccttggctttcactgtggcttttccatcccaggagtatctctaccagggagcaggaggccaagcccgggccagccagcctcagtcagatcaaacgcttccaagtcggctgcctctcccattacggaattgctgacaccaccaccagtggattcacgccactgtcactgtcactgctggctacccagagtgcctgtcttccaggagtctacccaggtgtgtactctacaggattagagcagccctggtgctgcaggggaccacatgtcaccatctccatccccttcttctggagacctttctgtcaacacatctacaattagccggctgctccaattcaaactaacatgagggaaatgtctggatgcccttcactgctgcacagccatttttgcctaccttggacaggcatgagctgtccttatccagctcctaaccagccttggaatttccctgtggttctggctatactctctgtctccattgagcttgccagtcccactgccacctgccccaacttccccaggcctgacttctctaaaggacccctaccccccctgaggctggacgttaggctgccactacactccccagggaaaggagggctcccttggtctggctcagtgtacctttctttggacttgctcttccatttaaggaatggaaaccatgactcttgacccttgccagctacaggagagaagatggaacatgagaggactgaggagggacgtacatacggggaacgggaagggggcacgtgagaggggagaggaagaagggggaacactccctttgtacaatgaggagagcagtggtgaggggtgtgaggtaaagtggagatgttggggctctggtccacacgatgcaaatgtagaccagcactctgtagcttctctttctttctcccagcgtaagctgttcctatccagggtacgatgtagcgtcatccattgctttccgtgtgagggggcgagtggaactggtaagtggtaagcgagggcccaacagtcactaatgcttaccaagcgcaccctaccacacacacacaggccacacaaaggtgaaggcggagagctctccttgacctcgggctgtgattcctggccaaggcctggacacagaccatagcaacgagcacagaggtcgcaggcaccggtgggctaagcagggataatggctggtggtaggtaggcagtggctcaggaccattctgggggacaatcaggtttacagggcaggaggtcaagcctcggtgcatggtgtggaaagtctccagggaaacaagacacgggagtgtcctcaaactggaacaggaaggcaggggtaatggtaatgggtgagattcttagtaagagagcaaagtggaccatgatccgcctcttaaaagtccctgtgggtagggggcacacaaaaagaaagatccagaaaaaaaggctcagaaggaagttttaaatagaaggctcgggtatttgcaaggaaagaagaatgtaagggaaggcagtctctttgcccaagtaaagctctggatttccattagaaaagatggactaaaaccaccatttgttggcaagagcagaacattttcaacagtgcctgctaactgcctgcctcgggaaagccagtccgcagagccaagcacacaagcagccctgctgtgtccggcatctggggtggacaccccaattccacaatgccctgaccagcactatatttttaaaaaagnnnnnnnnnnnnnnnnnnnngaaaggatttaagggagggagggaggaaggtagggagggagggagggagggaaagagagagagagagagagagagagacaaaaaaaaagaaagagagaaagaagaaagaaagaaagaaagaaagaaagaaagaaagaaagaaagaaagaaagaaagaaagaaagaaagaaaaggttttcaggatataagttttaaggtaggggaggtggcacatgaccataatcccagcacccaggaaggtgaaggcttcaaggccaacctgtggggagaggcagctaggaatgatgtctaagtgtgtctcgaaatagatgatagggagggtgggggaggggaggtgaccacagctctgagtgctcaagccacgcagactggatgacagatttttggtactttagacagccattagtgactttattgatagcaagttctcagagtggttgggccagaggagagggaaaccataaagctctataatgggttgaggcactaatgaggttggaagtaatggagacacacttctcctccttttcagttgttttgccaggagagggagacaaggtgcagtacgcagaggactgaggtttgggtggtttcagggttctgtcatcttgtggacaaaaaaaaaaaaaaaaaaaaaaaatcaaatatagtttcaggaggagggagaggagagaacagaggtagggannnnnnnnnnnnnnnnnnnnnnnnnnnnnnnnnnnnnnnnnnnnnnnnnnnnnnnnnnnnnnnnnnnnnnnnnnnnnnnnnnnnnnnnnnnnnnnnnnnnnnnnnnnnnnnnnnnnnnnnnnnnnnnnnnnnnnnnnnnnnnnnnnnnnnnnnnnnnnnnnnnnnnnnnnnnnnnnnnnnnnnnnnnnnnnnnnnnnnnnnnnnnnnnnnnnnnnnnnnnnnnnnnnnnnnnnnnnnnnnnnnnnnnnnnnnnnnnnnnnnnnnnnnnnnnnnnnnnnnnnnnnnnnnnnnnnnnnnnnnnnnnnnnnnnnnnnnnnnnnnnnnnnnnnnnnnnnnnnnnnnnnnnnnnnnnnnnnnnnnnnnnnnnnnnnnnnnnnnnnnnnnnnnnnnnnnnnnnnnnnnnnnnnnnnnnnnnnnnnnnnnnnnnnnnnnnnnnnnnnnnnnnnnnnnnnnnnnnnnnnnnnnnnnnnnnnnnnnnnnnnnnnnnnnnnnnnnnnnnnnnnnnnnnnnnnnnnnnnnnnnnnnnnnnnnnnnnnnnnnnnnnnnnnnnnnnnnnnnnnnnnnnnnnnnnnnnnnnnnnnnnnnnnnnnnnnnnnnnnnnnnnnnnnnnnnnnnnnnnnnnnnnnnnnnnnnnnnnnnnnnnnnnnnnnnnnnnnnnnnnnnnnnnnnnnnnnnnnnnnnnnnnnnnnnnnnnnnnnnnnnnnnnnnnnnnnnnnnnnnnnnnnnnnnnnnnnnnnnnnnnnnnnnnnnnnnnnnnnnnnnnnnnnnnnnnnnnnnnnnnnnnnnnnnnnnnnnnnnnnnnnnnnnnnnnnnnnnnnnnnnnnnnnnnnnnnnnnnnnnnnnnnnnnnnnnnnnnnnnnnnnnnnnnnnnnnnnnnnnnnnnnnnnnnnnnnnnnnnnnnnnnnnnnnnnnnnnnnnnnnnnnnnnnnnnnnnnnnnnnnnnnnnnnnnnnnnnnnnnnnnnnnnnnnnnnnnnnnnnnnnnnnnnnnnnnnnnnnnnnnnnnnnnnnnnnnnnnnnnnnnnnnnnnnnnnnnnnnnnnnnnnnnnnnnnnnnnnnnnnnnnnnnnnnnnnnnnnnnnnnnnnnnntaagtgatagtctggcttgagtctgggatactcaactgtaaactaaagggagtgggtgggtgtgtgaatccagcctgtctacagcaggaaggggtgtgttttagagagatggggattcatgcttgctataaacctggtcagaagctgtgtctgggccagggtgtcacaagctttagagcagatgctattacagttgtcttggtaaatggttgtgcgtgttatcacattaccttctagatattttgaagtggaaatttctgggtttttttttttttttttttttttggaaactcagttatgttttgtgaggcagatacacaggtgagagaatgtgttgctgaagcagacacaggtgagaggatgtgtgatgtttaggaagactataactatgaccccacagacagtgggaggaggctctggcattggttcactagtcttcgctgaggaggctcttgtattagcttaccttacatcgtgttgctcatcttcgcctgtcatgactttgtagagagtaactcagccaaggacttgtgatattcctgtggcttcttgctgcttccgaggacttgggctgattggctggtggaaccccgtggcttcttccaaacccaactgccattgctgattcgtgactggtgattgccgaatggactggactgctgctgctgctttgtgttggtgtttgctacaggactggactgctgacaacggatattggaatagcccccaaaactaaacaggtccacaacccccgttccctaattaacctttctcttccattacctctggtgggtggtggactagaacccttattaaaataggtttttgagaagtctaagccaataatatttattgttacatccatagatttgtgtggccgtcatcagccttgctcaggggagcttctttttgcagtgggtaatacaaaggtgcagaactcactggccagaatgctgaggaaaagtgattgtgtattgtcctaagtaggacatggcaatgtattacaagtgtgtaagggcagtgggtggggaggagcactgtgaaatggcatcatttggacaacatggccactgtacacatgaattcacagtgtttgtggttacttacacaaggccaaagctccagtatgggtagggtcaagaggctcaccatgtgcccccccccccccagaggagccactggcagttgatggcagctaataaagagaaagtcatttcctattctttttttaaagaaatattttagagggctgagagatggctcagtggttaagagcactgactgctcttccagaggtcccgagttcaattcccttgcaaccacatagtggcttgcaaccatctgtaatgggatctgatgtcctcttctggtgtgtctgaagaaagttacagtgtatgtgtgagtgtgtgtgtgcgtgtgtgtgtgtgtgtgtgtgtgataaataaatctttaaaaaataatgacataggaaatgtgattgcttgacaagggagccaatctaaaaagccaaccctttccatgtctattggttctgggtccaaatactcttcaggcagggtgtttgtacccgacctaacaatctaggttctaacctcaggaccttcgtggtggaaggaaggaactggtaggagttgttcctgacttccatatgtgttccatggcacatgtaagcccacatatatacataaatacatcatacatacatacatacatacatacatacatacatacatacatacattgtacatacatacctgaacaaaaaaaatatttaaaaattaaacaatacgccgggcggtggtcacgcatgcctttaatcccagcacttgggaggcagaggcaggcagatttctgagtttgaggccagcctggtctacagagtgagttccaggacagctagagctatacagagaaaccctgtctcgaaaaacaaaacaaaacaaaacaaaacaaaattaaacaatacctatacaaacccaacaaataaaccatctccattggttttgctttgttttttggccccttggttttaaccatctatcacacagcacaagaagggtcccgcacataggctgggagggtttcgtgtgtgcttttccctaaaattgcctcagcagagtaaccgaggcagtgtgctcagtcacatatcagtcctgggccggggcacatcagtcctctccttgctttcccaagcaccctagtgtgggttcccagggttcagcgctggccagagtggccctgtgcgtgactaatggggcgaggtgcgcctgttgctctcacccaaagcctagatggcacaaagtcagaggcacatatttgggggcatggcttcctgaaaccaccacgctctcaggatgtggttggtgagacagagcagagcattcaaccctggggacagattgctgagagttagggtgacctctcctagaccctgcacacaggagggacacacaggaagggacacacaggaagggacacacaggaagggacacacaggaagaggcatagtgtcctttagatgaggtcccccaggtaccaaagcctggagagagagagagagagagagagagagagagagagagagagagagagagagagagagagagagaaacagccccctcgttgagccattagccctaggaagaatgtcgtgacacaaggcatgaattccagaaatttattggaaacacaatacaaactgacaaatagatggcctctcctacggacagacaggccacactggcacggcgtgggggagagctttcccaagagcactgaggccagctctggttcgtgctcgtggcgggggggggggggaccagaaactgggaggagaggaacaggcaggggtgtacacagaaaccaggacatggctttctagaggggagcacaaggcaaggtactttagtgggccaattcctccaaaggagagcagggtcaactgtgcagaaaggctttccctcctggtaaagctctccctcctcagaagaatgaaaacaacctacaagcccaagcaggccactccgctgcttccttccccaagatcttagcattgcagaggaactgccattctctgaagacagagcaacaggggtacccctgccccagggctgctctcccttggccctctcttcctctccccctgctgcttgctgagcccacaggttcccagggtagctggcttctggctggagccagctggtgggaagcacccacggaaatccagagggtgggagggagaggccaagttctttctccccactctctgactcctcatggctttggctccttcgaagtggctctggcccgtagtttcatggccttgtcagtatgtgcatctgacctgtgctctccgctcctgctattcttactttagttaaatacaagttttgctctcctggctgggccctgagtgatagacactgggccgtagacaaggcagaaccgtgggagcttccagcagcctccttcagctctccacttccatacaccctcagtttatcagagcagtggcaatgtctgagggcagacatttcttgggtcctcccaggggacctggcatggccgaatgcctgtggagagagcctcagcttggccatcatctgctcactgagcagcggtgacatgtcatcgactcccatgacagcatcaccgtgggcctcagaaaggctgtggtgagaagctctcttaacaccaagtgctcaaaaaggcaaaggcaagagaccaggtcccttggaacctaccctgggacattcctgctgtgttctgggtttcccagtagtcaggtggaggagccaagttgcttacgttatgtgttgggaagggcgaggctgcaagagcccgctctcacaagcgaggtgagagagaacattctagatacatggggctcaaagtcagttgtgctttccccgaagccaactgggacccaggctaggacaggcctcctgtgctgctaccatccctggcgagccccttctccagatctcctggacctggcagagagaatgagacctcggcagtcagggtgactggtgcttagctgtcactcatgatgtgccagggtagaaaaggaaaataaacaggggggacaagcaagtgtttctccctgtgtctctgtgccatgtaaacccagggcagggtgagagacaactgtgttagctcttctcttttttttttcaagagaatatctatggtggcttgaataagtatggcccccaacgactcatgtgtttgaatacttggcctacagggagtggcactattaggaggtgtgactttgtgggaggaagtgtgtcactgtgggggcgggctttgaggtctgctctgctcaagctctgctcagtgtggcacacagtctccttctgctgcctgctgatcaagatgtagaacccttagttccttctctagcatcaggtcttcctgaacactgccaggcttcccaccctgatgataacggactgaacctctgaacctgtaagccagccccagttaaatgttttcatttatcagggttgccttggtcatggtgtctcttcacagtaataaaaccctaactaagacaatacccccaaaagccagttgctccctcttttgggtctttgctgatggcggtactatagtgaaatgccagccacctgcacgtgtttcatggggcaccactgacccaggccccacctgcagggtcccaagccatggcctagcagtgatggggacttgccatagctgtgtaaaggcatatgctgagaagaacctcctctccagagagctctgagagaggacaaggcagctggtaccctgaccaatgtcctcagccacacacaccctcctttctgctgcatg

SEQ ID NO: 229 - DNA, 1527 bp, Mus musculus
gctccttctccagcaccatgcctgcctgggatgctgccatgcttcccaccatgatgataatggactgaacctctgaacctgtggccaacaggagactacgcagatcacaggtcgcagatcgcatcactccaacctcccgattacctggccaccacgttgtgggcagaagagtcctgcctgctggccatggaacgccgtgtgagagtgaagtcttgggtagaagagaatcgggcctcctttcagcctccggtttgcaacaagcttatgcaccaggagcagctcaaaatcatgttcgttggaggccccaataccaggaaggattatcacattgaagagggtgaggaggtgttttaccagctggagggagacatgatactacgagtcctggagcaggggcaacaccgggacgtgcctatacggcagggagagatattcctcctgcctgccagggtgccccactccccgcagaggtttgccaacaccatggggctggtgattgagagaaggcggctggagagcgagctggatgggctgaggtattacgtgggggacactgaggatgtcctctttgagaaatggttccactgtaaggaccttggcacgcagttagcacccatcatccaagagttcttccactctgagcaataccgaacaggaaaacccaaccctgaccagctgctcaaggagctgccattcccgctgaatacacggtccatcatgaagcccatgtcattgaaggcctggctggatggccactccagggagcttcaggcaggcacatccctaagcctgtttggggacagctatgagacccaggagggctcctctaaggtgacaatgggagggcagtgtatagccctggccccagatgacagcctgctggtgcctgctggaacctcgtatgtgtgggagcgagcacaaggctctgtggccttgtctgtgacacaagaccctgcccgtaagaagccatggtggtgaccctcctgtgtgcgccccaagcagccacagggtgcctgagtaatgacctggtagctgcccatttccagacagctctttcagcctcattgcatctccatggacatcagcaggccccttgagtggttgagagctgtcactggcatcaaccctcctgcctagctcagcccaggatgccagactcctaggacatcagcagtccccgatcttctaacagccatagccctacactgtccccatgtgcccagcagcctgacactaagaaatctctcaataaaggcatcctgctgaatgagtgcttgcgagttttaggtggcagacctgtgttcccctgtcatgtgttacttggggacaacagttgccacagggagttagaaggcctgttaatgtgtgtcatcacctcttgtggataggtggttccctgtgcatgcaaccctgatccacacccgctccgcatcctgcttataaagccgcgtgcttctttgtctctccctctgttccctgttcattcatttagttgttaacatacttaaaaataacaacaaaccccca

SEQ ID NO: 230 - protein, 301 aa, Mus musculus
WTEPLNLWPTGDYADHRSQIASLQPPDYLATTLWAEESCLLAMERRVRVKSWVEENRASFQPPVCNKLMHQEQLKIMFVGGPNTRKDYHIEEGEEVFYQLEGDMILRVLEQGQHRDVPIRQGEIFLLPARVPHSPQRFANTMGLVIERRRLESELDGLRYYVGDTEDVLFEKWFHCKDLGTQLAPIIQEFFHSEQYRTGKPNPDQLLKELPFPLNTRSIMKPMSLKAWLDGHSRELQAGTSLSLFGDSYETQEGSSKVTMGGQCIAPDDSLLVPAGTSYVWERAQGSVSVTQDPARKKPWW

SEQ ID NO: 231 - DNA, 45783 bp, Homo sapiens
  misc_feature (1)...(45783): n = A,T,C or G
tggctattaacccgttatcagatacatggtttgcaaatattttctcccattttgtagcttgccttttcactctcttgatagtgtcctttgatgcacaaaagtttttaattttgataaaggtcctatgtttggtggttgtttggggctttgtttttgagacagggtctatctctgttgcccagattggagtgcaatgatgccatcatagcccactgcaacctcagactcccgggctcatgcaatcctcctgcctgagcctccccagtagatgggactataggcacacgccaccactgtctgcgaacttttttttttaaattagaaatgaggtcttgccatgtttcccaggcttgtcgtgaactactggcctcaagggattttcccacctcagcctcccaaaacactgggattacggacatgagccccagaacccgacccctatgtttagttttataagaaactatggaactcttttttttcaaattagttgtgccaccttatactcccaccagtaatgttgagagttccagttgcttgacatcctcaccaatgcttcatattgtcagtctttaattttagccattctaccgggtgtgtaatagtatctcattgtatatttaatttgcatgttaatttgcatttatacaatgcaaattaatttgcatatatttaatttgagcatgtcattaattgctcaactaatgatgttaagcaatattttgtgtgtgcttattggtcatctgtgtatctttataaaatggttgctcaaaccttttgcccattgttttgttgttttttgtttgtcttcttttttgtttttgggttttggtctttttttttaattaagttgtaggagtggctaaatgcctcgggtaagtcattgattttctgtttctttatctgtaggtagcaagtatgaattcctccatgacatctgggctacaagaaatgccaagcttggccactgctcacagtacccgggactcataagaatccatgcatgccttctcccatctaagacatgcgggatccatgccaggaagaatgaggcacatgccagaggatatgggggctgggaggagggcactaacccagagtgatttgaaatgaggtagcattcaatggcccctggcaaaaaagagaaagaagacgagggagctgaaaaatgtcttcatggagaaaggagggagggaagacagggagggaggggtggtccaactggccctggagcaggggaaaatggaaatgtagcagatatataagctaaactgaaatctcagcacagagctggcctatgaatttctcccagagggaccttctgcctgtggggtaaaagggagcataaacttccagttctgtttgcagagagccctgaggaactgacactgaccacagccagatgagaggccttctcctcagctgccaaattctgctctgcactgcccaacagtgtcttagctagggtagctggctccatcccagggccaacagccaatttcgattacattaaggaggcagtgtattgggggaccaacaagttttattgtttgataccctgatcttagaacctaaccctcccagaggtgcaaatcacaaccataaacaaatgtatcgtaatagagaattaagcttataaagatacatcagtcaggggacagaaactataccaattatttaacagagacaatgtaatacagagaactgttaactaggtttatggttattaactagataactgaaaagtcaaaaaaacaaatctgcagtatcacttaagttagtaactgcaagaagcagctacccactcgggctgagagaacaaaggaagaagttgaaccactaaagcttagaagttggaggaagagccctctgcataattgaaactcagacttctgaggaaaggctccagcatctgcactggcatctctgctgtggtcactttaaagctggttctgcaggtattgggaaaaccacagggtgggtttggaaactgctaagggagccagggcttagtggctcacgcctgtaatcccaacactttgagaagccaaggtgggaagatcgcttgagccaaggactttgagagcagcttgggcagcatatcgaggacctatctctacaaaaaatttaaaaatgaatccagtgtggtggtgcgcacctgtagtcccagctgcttgggaggctgaggcaggaggatcacttgagctcaggagttcagggttgcagtgagctgtcatcacaccactgcactccagcctggagcaacagagtgagacagctccagagtgagacccccgtccctaccactactactgctaataataataatagtgccaagcttgtgaaaccgggtccaaatggaaagtgataagtactcaactatctccctcagtgggtgtgaataaggacacttccagcctcatcccttggccactcaaggaaccagcctcgggatgaagctaatgctatgggtagcagatgggagggatggaaagaaccagggtccatgatggcgatgctgagtcacgggctcactctcctctgggtatccagttgtgtaagccttctgtctttctgttgattacagcattgtttaactaaggcctctgctactttgcagccacaagcatcttgatagattaggaaagcaaaaaagaggataaaaaagaaaccaggaaaagggatgtgtggtagatgaaataatccttcttggttcttttcaaaaatctcctgtcctgatccccggaatctgagtatgtcaccttacaaaacaaaaggggatgttgcagatgtgattaagtagttcgatgaagagattatcctggattatctgggtaggcccaatgtaatcacaaggattagttacagaggaaatgtgacaacaaaaaaagagaatgaaatgatgtgttttaatgaagaaggaaggcaccctgtgagccaaggaatgcaggtggcttctagaaggtggaaaaggcaagagaacagattttcttctagagttctcagaaataatgcagctctgacaataccttgatttagcctataagacccattcagacttctgaccttcaaaactataagacaatacatttgtgttgttttaaggcactaagtttgtgatttttttcaatttattttattttattttttcgtaaagacagcatctggctatatagcccaggctggtctcaaattccaggcctcaagccatccttcctccctggcctcccgaagtgctgggattataggtttgagccaccatgctgggcctgtggtaatttattatagcagctataggaaactcacacaacatggtagttacaaaaccaaaagaagatgctacgaataagtacaaatgtagcaataattaaatagatatgaaagagttgaatccaatgactactaaacacgtaactaacagattggattttttttaaactccaggtaggtgcccttcatgaaagatatatctaaaacaaaatgatgcagggaaaccatatacctgttgtctcagttatctactgcagtataacaaaccaccctcaaaacttaatgacttagtgccgggcacgtggctcatgcctataatcccagcactttgggaggccgaggcgggtggatctcttgaggtcaggcgttcgagaccagcctggccaacatggtgacatcctgtctctactaaaaatacaaagttagccgggcatggagtcacgcgcctgtaatcccagttacttgggaggctgaggcagtagaatcatttgaacccgggaggtggtggttgcagtgagccaagattgtgccactgcacttcagcctgggcgacagagtgagactgtctcaaaaaacaaaaccaaaccaaaccttaatgacttaggaaggtggctttagtggccgcatgaagcacaccctgattgccgaggaacaagagtgcaaagctaagaaactgaggcattttgaagagtttgaagacacttggcttccttatctgacccccaaagatgaattctatcagccgtggcagctgaaatatcctaaattaattctccaagaagccagcagtgtatctggggagctccataaagaggctcaagaggccgggcgcagtggctcacgcctgtaatcccagcactttgggaggccgaggcaggaggatcacgaggtcaggagatcgagaccatcctggctaacacggtgaaaccacatctctactaaaaatatttttaaaaattagccgggcgtagtggtggatgcctgtagtcccagctactcgggaggctgaggcaggagaatggcgtgaacctgggaggcagagcttgcagtgagctaagatcgagccactgcactctagcctgggagacaaagtgagactccgtctcaaaaaaaaaaaaaaaaaaaaaaagaggctcaagaagcttttctcacactgcacaagcatggctgcttattttgagccctggttaggatccaaggcaaagatttgctcacttcagtatctcccatcctcattggtaatccaggttgcacctacaagtccctgaacactaggttctttatggtaccatggccagtgaaagggtctaatataaaatacaccgagggtcaggtgcagtgactcacgccctgtaatccagcaatttgggaggctgaggtgggcagatcacttgaggccaggagttccagaccagcctggccaaaatggtgaaaccctgtctccactaaaaaaaatacaaaaattagcatgatggcatggacggacctgcaatcccagctactcgggaggctgaggcaggaggatcgctcaaacccaggaggcagaggctgcagtgagccaagatcgtgccactgcactccagcctgggaaacagagtgagactctgtctcaaaaaataaaataaaatacaccaaggctgaaatagctgctgcttgtcagaccttcctcaaggtcaatgactacctgcagatagaaataatctaggctttggaagaacttgctgccaaagagaaagctaatgaggatgctgtgccagtgtgtttggctgcagatttccccagtgctggcatggggtcatcctgtgatggacaagaagatgaactggacataaagagtagagcagcatacaacgtaactttgctgaattcatggatcctccgaaaatcccacacctgaaagagaaaccttattttggcatgcggaaaatggcagtgcgctggcatcatgctgaaaatctggtggacaggccccaaagaggaaagtgaggacgactctcatcttgaaggcagagatcttgatacttggcatgttggtgttaagatctcatgggatgtaaagacacctggtttggcaacaccccaaggagactgctatttcatgcttggtaatctttggagaaccaaaattatattgctactctagcatctaaatttagattattgggtatatattttgaatatgtcttataaagtaaacttctggagcatttgatattaatagtgaaacttctttacaagaacatgtaactaggtttttcttttttgagatactactaaattttaaaaagttgcttttctttttattctaagtagttgtggagttcctcaaatatgctaaacaattttcagaattattcatgaaagctattaaagcatccaagtcaacttattagtataacttgaaaaaatgtggccgggcgcggtggctcacgcctgtaatcccagcactttgggaggccgaggcgggcggatcacgaggtcaggagatcgagaccaaggtgaaaccccgtctctactaaaaatacaaaaagttagccgggcgtagtggcgggcgcctgtagtcccagctactcgggaggctgaggcaggagaatggcgtgaacccgggaggcggagcttgcagtgagcccgagatcgcgccactgcactccagcctgggcgacagagcgagactccgtctcaaaaaaaaaaaaaaaaaaaaaaaagaaaaaatgcttccctgtctatatgcgtttttagtagtgagagagttttgtctagttttgaatttagttcttctcaggaacagctgacctgacaatggggcctttctctcaacttgtcatttagttctttcggaagaaatatctcagctgtggttaggctaacttaagctgtagagtttgtggggctttttttttttttcttcctgctgtaagtttttattttgtttttggactttctacttgttttccaatacgcaatgtgcaaacagtatccttttttactcaaagcttctcggggcttattctttacttggctctagttcctgattcttgggggtttacctcactcttgtctacctggagaaatctactcatatgttagttttggagcccggaagaaccagggctgacactcagtatttataataagagttaattcccaatttggtatttgtagagagtccactgtgttccaagtactgtgtaaggttccggaggagatatcggaggtggataaatattggtccttgcctttggggaattcagagtaccgaatagctctttaggccattctctcattaagtattttccaaatttcagctctttgcacatcagcttcaaggttttcgtcatatccatgtactacttgtataattatttacatactatttctgcctagataaactaaccttttttatcttagaaaaaactgaatggcttaaagtaacaagtaagacagctgggcaagtctctgcatgtctcccctgggttcactcatgcagctacagtcatctcagatggtcttacacagctggtgcaggctgttggccagcctcaccctccacattgtctctcatcctccaggacactaacccaggcttctacacatggtgggagcagcgttccaggtgatgagatcagcagctgggagacctggtgaggactagactcagatgtcccatagcattagttctgctgccttctgtattcacaagtcacaatgccaaacatgattcaacgaataaggaaatggacttcacctcttattagaacagaggcaaagtcacaaggcatatggattcaggaagggaaggagttattgtgtcatttttttgatcaacttaccatatctggaaaacactagcacaaagtgggtgtaggaatattaatatcaaagttgaagtcaaggtgaaaagaaactaagaggaaatatttcttagagataaaagaaacactacaagaagaagataaaatagtcatgagcatgttttcgtctaatgacatacattcagaatatgtaaagcaaaagctgttaaagaataaggagaggctgggcacactggctcgcagctgtaatcccagcactttgtgattacagcactttgtgagcccaggagttcaagaccagcctggacaacatggggaaaccccatctctacaaaaaaaatacaaaaagccaggcgtggtggtgtgagcctgtagtcccagctacagtgaggacaggcaggaggatcacatgagcccggagagattgaggctaagatcgcaccactgcactccagcctaggcacagagtgagaaccggtctcaaaaaaaaaaaaaaaaaaaaaaaggaaaaattgaccccaaaaatcacagtgttagattttaacatatctctcttggaaaataaaatattaagcactttaaaaaataaagatcaagactatttgactaacacaatagcatgacctaatagaaatattctgaactacgttctaagcagagtatacacattcacaaaaattgaccataagctaaactgcaaaggaaatcttaacacatctccccacccaaaaataatacaacacggaccatcttctctcaccacaatgcaatacaattagaaatgaaaaacaaaacgatagccaaacaaaaaacaaaccagtgtatgtctagaaacttttaaacagacttgtaaataactcaagttaaaggggtagcaggaccagaacctagacttccaaataaccagtgtagttcatgatctagtccttttgttcatataaagctatttgttttaaaatagttgctgaattacatgaaagggtgagaaagtgggagagacagaaaggcagagacaaaacaaggtgggctgggaaagggattcactggagcaacgagttcagtgtatggaagaattgaagggtcagatagttattaccagccaggttcagcaaagcctagaaggatctgctggtctcagtgacctgggcaggcaaacaccacccagcggaggccaggggaagacaccagcaagcaggccagatcctttgagcttggatcgtagggtagattctatttgcttctaatcctttagtgcagatgagctcctgtgtgcagaggagagaggtggctcctagaagcgggtaaattccagaaactacaaggggcccaacagtcagtatccagaaggattccagatggttccaactcaacaatgccagaatactcacaacatagcaactgtccgttttctgaacattggagtccagtggtgcctgagccaggaggcttgccaattcagtagaccagacgtggtatttgctctacacagcacaaatcagagggcatatttgatagtgataacatagcagtcatttagcttgtgtagagggttactcgggatatttcagacccccaaaattctacttgtggccttaattattcacattatttgatcacatcagttaaaatacagtgtacctatcattctttcctttgcactatggtaacggaacatctgttgggctgaaatcaattttttctcctttttgtgtgaattcattgatgccttcatccacccactcacccatccctccatttaactaacactcaaagcaaacttaacacatctcagatcctcagtgcttcatgtgtcattgtttacgtctcctctgattacttgtagatgagaaaaataaagaaggtggtgtgagttacttgggtgcaaaacgatattctagttttgcactagaagtgctcagctaaaactgtgctagataaataactaaaaaaaaggagagagaaaaatgaaaaaaaaaaaaaaaaagagcgtcagagaggaaacgggagggtctcagtggggaattcggcttcctgtcgtctgggttttgattttgagttgcactagaggagtctttatgtctggaatgctgagaaaaccagcccaggccaggcgggctgtgagggcaggatttggaggcatttagtttcttaaactctatagtctggattccggtgtcaggggcctgagccattttcctcctcccctacccgtcagctcccactccctccaaacttcctaagaaagttctgagtcctgcagaaagacaggcttctccatcttccacacccgcgcagatttctctttcctcacacatgcacgcccaggcccagcgccccagcccctcacccccaggataactgttagagtctctcacacggggctgtcatcattaacaccccgagattcccgagggctaggacactgaggccggtgtccacatctgccaaattcctcccatagctgcgtgcgaactgagtatgttcctaagacgcctaaggagttcagcacggggctcggggtccactgcgacactgcgcggacagcggccgctcggctgggcctcaggtggggagggctcgcggtcctgccctgagcccgggctccgcagctcggcgcctgcaccgctcccctcgccgagcccgcggcggagtctgccggccgcacgcagcaggtctggggctcaccttgaatcgggacctgcggggaccgccgtgcggcttcccgctgggtgagcgcggcagccctgagtggcggggcagtcattccccttttccagatgggaaagccaaatcttgagcccagcgccagcaccgtgttctcaggtgctgggacttccaacccgcgatctcctcactgtagtatttctgggaaccttccctgggattcccctcggggcgtagagggaaggaacgtctggggacaagcgtccaggaagggtctggattctttgtcctccgccgggagcaggccccaccgcaggcgccagtgtgtggggcgccccggagacggtggcggggaccgagcccctgccccgcggagaagcagggggcgcgggacgccgttccccagcgctgccgccgccgcgctcgccagggcctggagtggcgcggagggcggcgggctcagaccaaagtccaccagggggcaaagtccgcgggccccaagcccccaccacggggtcgcgggggtttgctccgcctcgtgagcttgggattctggttaaaaaggcggctgggcggagctgcgggcctccgacggcgggaggacagcgctgcgaggaggcgcccgggacagtcatggagcgccgcctgggagtgagggcctgggtgaaggagaaccggggctccttccagcccccggtctgcaacaagctcatgtgagtccagcacccccatggccgccccctgccctcgcctcctccccctcctccatctgcgccctcaccttccagctccgagttcctggacccagaagcttgcagaaggaccgctttaatctcttggttcttgggggaagatggagacaggctgttccggttccaccacatcggtctgttcctctttcttgtgactgtggccttgacttctgaagaaggctgagctggttctgaggctgtaggagatgagatgacagggtgcacctctccttccagggctgagaaacaattctccaaccccaagtgacactgtgcattttgggaaaactcaaaagtgtggggagggtggttttcaaggcagaaatgcactagaatgtaggcctgggggcagccaaatcatacaccccaaccctgtcccagaagccacaggcaaagggggaggcagagaatccactcctttgggaagatcttgatgtcttgcttttttcagggcccctctatgcaggtgtgcacgaacacacacacacacacacacacacacaccagaccctccctaggccacctctgccagtagcctctgcctgcagcacccaacagggttggccatccagctgccatctttctcaggcagacctctcaggccctcccctgtggtatggtcacctccctcatccccccagttccacggcggggccccacatgccagctagatcaaggtttacattccccatttttgctgtgtccacaggacatggtcagtagggtggcacctcaaggcaaacagcaggcccaggactatgccaagtgtttttacatcatctcatctcattctcacagtagcaccgtgaggggggattttcataagtaacttttctagtgtcacggagcgcctgtgcgataggctccagactcaacccacggagcagttcgactccagagtccacgcacactcttggtcaccatgcaataccacatggccaacagtcaatatctccccaaagatctcttctatcactgttgttgcccacccccaattaaagatgtagcatcatctttgcctccttccaccacttcatccccatctgcagtcgctccttctcagtcctcccttcgctccccctgaggtctcgcgtccatctgcccaggcctctccctagcatttggtggtttgctggcatcattggtattcttgcttctgctgtaccacgcccacctccaccttcgtcttcacaaggcagtctccttgtgtgtgtgtctgtgtccaaatttccctcttttaaaagaacaccagacatattggatcaggggctcaccctactccaggatgacctcatcctaacctaactacatctcaaggaccctattccaaataaggtcacattctgcagtactgggcgttaggacttcaacatataaattttacaggaggggttactattcagcaaggtgagaagctgctgaagcaagcaaggtgagaagctgctgaagagttctgggcagaggaggggcaggtcgggtttatgcattctgactgatgggttgaaagagttcttgagtggagttgtttaagaattgtctgtatgtacctaaattacatctcagtgaagttgattttaaaaaacaactttcaagccgggcgcagtggctcatgcctgtaatcccagcactttgggaggctgaggtgggtggatcatttggggtcaggagttcaagaccagactggccaacatggtgaaaccccgtctctactaaaaatacaaaaattacctgggcgtggtggcacgcgcctgtagtcccagctactcaggaggccgaggcaggagaattgcttgaacccgggaggtggaggctgcagtgagccgaagttgtgccactgcattccagcctgggtggcaagcaagactctatctgggaaaaaaaaaaacaactttccaggttccccagcaccccttaggccaagaccagactccatggctggtccaccctcctggaccagccttctcaatcgttccccaagctcacccccagtgcttctaatctcagagcctctgcacccagctctcctgtgcacactcttccccagtcaagttccttgcggcttccctcccctccttgaagctctatgcagctttaagttctttaagcatggactgttcatgacagccttctcctgccctgcgacctcatccacctttccaaacatcaggtccacacgtgtgtttccggtttattgggcccagcctcccaaaagggaaggaaaaggaaagagactggctcttccgtcttgcctccatgcctcccagctgggctggaaagcagcccacaggacaggacactcagaaaggacctgccagtctagtttgggggctcagacctcccccatagcccctcccctgccatccacaccatcgtcatccatgcaggcagcctctaggctgctgtgccctgtgtgtacaaatggtcccagacccagcgcctccccttcccagaggaaagccctcgcccctgccctctgtggcagggccacctgagaacaccctgaagccctacgcagacacattctgctgcttattcaccccagtgtctgcaccctgaaaggggaccctgctgtggggatggggcaggctgttctcaggaggtgctgaggtatttttcgcataaaaaggtaacaccacaccaacagcagaaagactgaggagtttgggaacccttttgttccaaacagctgactagatgccccacagacccaacgccagcatgggagtcaaggagcctgagacctggctcaggttcagtcattccctggctttgtgaccctctcttggctggctaaatcggctgtaaaatgagagggttgtattgagtttatttatttatttatttaagacagagtctccccctgttacccaggctggagtgcagtagcgcaatctcagctcactgcaacctcacctctcaggttcaagcgattctcgtgcttcagcctcccaggtagcggggattacaggtgcccaccaccaggcctggctaatttttgtatttttagtagagacagggtttcaccatgttggccaggctagtggcctcaagcaatacatccgcctctgcctctcaaagtgctgggattacaggcatgagccaccacgcccggccgggtttatttattttatcaaatacttaaatagtgcttactatatgctaggcaccattctgagagcttccaaatattaattcatgtattctgtttaaactctgtgaggtaagaactgttcctctattttacagataaggttagtaacatgccccagggcctgtgcttataaacacatgccacactgacttgacaccgcctgaggcccctgctagatgtcacggtctcctgcatccactgagccatgcctccagccaggggagagtgcagggtcctatagtcagacagcatgggtgagtggcaggtcaaggtcgttttgcccctacactgccccatcctgggaaggggtcttcaatttgctactctcctgtaattcgagatcttgatcctgtgatcctggttgatgaagccatagattcaccaccacatcatttcccttgttgggtcagacgatgtggggggacacacaaacaatgacagacagacacacagacacgatcccagacacatagacacttagatgcacgcaggcatgaaccggggatgagagttggggaacagggacagtgaggccaaaacagccctgctcctctcccaggggccctcaggctccctcctggcccccacgggacccgtgctctcttcactcctaggagatggtttagaacgtctcccccactttgcgcattgcaggcaccaggagcagctcaaagtcatgttcatcggaggccccaacaccaggaaggactatcacatcgaagagggtgaagaggtaggtttgactggtctccctggatctaggcctgcgggcaaggagcctggccctagcgggagggggcgcttcccactcgaggcccagagatgatggactggagaggggtggacatgtggctgatgagtggagggggcacagctgaaatcacagggcacgactgctgcctccaagctggtggtcaggcagtgacgcctccacagctagcacctctgctgggggagccccaggaaacagcccatgccctgcgggtgagaggttttagccgtggggcatcctccccctggatataggggctggccttgtgaagggggacgtcctggtcccctccccacaaacttgacagattcaattggtctccaaaatgagatcctcccccgcagacgggggcaaagtgcaaaaacaccgtgggtgagggctgggctgagtgggtggcagagggagctcgaggggctgagggaggaggagctagtggctgagggttaggcatggtagggaggtgcctggagctgaaggaggagttggggcagggtggcccttccttaactaaaggctgcaaaacccattcgtggcttgtggctggggcaggtgggagggggaatttgccttgaatcaccttttgcaccttgaagtttggactgtgcttctctactacctaccccaaaataaataaacaaaagcaaaatttaaagagaaaggtgtgtccccttaaggagagacacagaatctcctctggtggaaaaggatcagtagaggggctccccatcctctcagggagcctcattctgggggttcaggatccagagtccagcttgatcaacagcctctgtccccactgagggcatccaggccacagccagggactgtggtgagcatgggagaatcacttgttcaataaatatttgctgagcacctcatgtgtgcactgggacacccaaggctgtgtggaggaacgatgggccctgggccagcagaaccagccaactcctcacctctcacgctccaggggccctgcacctcccctggccacccccttctcacaaacacacctcactggagaccgtttccttggtggaaaaagtcaataggaaaatctaaaactatactgaggaggtgggtagacctggcatggctatggcatgggaggcacagctggctgcggagtcttccagaggcttctgccttctctgttggccctggtctcagcacccgcctctcctgtctccctctgtctttgcttcccttctcgccccctgctgcctctgctccatgccccatcccatggtttctccaagctcaggtgcctgagtgtcccctgaggggcctggccagcagctcacgtcctgactcagatggcagctgagtgattgagtgataagaagagctggccagcacaggtgtcctcactctggagggacgcccaggtgtctgggaggaatctggctggaggtgggcttgtgacagggcttggtcccaccctgctgaggttttggtggcggggtggtgcagcacttgggcagcctcagggctgagggtcggcctcctctctgtccctgcctatcctcacccagctggagcctggggagactccaggatgcgctgtggaagtggcgtaactcagggtccgggctcctcctgaatagtgagaaaaggggagttgctcagacctgggttcaaatcacacctcttaccaaaccacactttcctcctcactgagctctgcctctgcaatagcggtcagggtacctccagctccctggcccggctccccactccccagcgccacctaccacctatactccacctacctcactcctttcttggagcgtgcaggtgcaggggggccagaggcagatgaacttgcattgggggaattctctgccgcttactaaccccaggatcttggacagggcacatcatgtcacctctccaagcctgtttccataagcacatggggacaacagcccctgtctggtggaagaattcaatgtgcatagagtatgtgcacacagcctggtgcagagttggtgcttgatatgcattgttcctctacacctctcgccctttctgcctggactgcctgaaaggcctttccaggtcagaaagccagattctattcattatctgcctgagccagtacagttaatcttctagccagccccaggctcccaaacatcatttacttccaaactgagcataattcctttaggattgcccacagctgttcaggattttctgctgttcagtgatctgtacctctgccccaggccaggcctgcccctcatcacagggaagacctctgagcaggggacaagagcgagaaaatagagacaatatcgtatagcctgcccagtaaggcagtaagggtttaaatctggcccagagggtcactccggactcccctctcccaacttttcctttgtccctcctcccttccctcactgtgaaaggtccctagacacacacacacacacacacacacacacacacacacacacacacacacacacacacacacagaggcttcctcccagcttggagagtgggggaggagagcatactgaaatgctccctataagagaacctggtaggtttcttattatttgtattaaataatgcttatggggtttttgtttgttcatgtttgtgtttgtttttgttttttagagatgggggtctcactctgtcacccaggctggagtacagtggtgcaatcatagctcagtgcagcctcaacttctggggctcaagtgatcctcccacctcaggctcccagatagttaggactacaggcacacatcaccatactcagctaatttcttctagtttttgtagagatggggtctcaccatgttgcccagaatggtctccactcctggcctcaagtgatcctcccatctcccaaagtgctaggattacaggcataagcctccacatccggcctatgggtttttttttaataaggaaagtaaacattgttccttgtagaaaatatgagaaatatagaaagaaaaatccttacctcattcataatcctaccacgcagagggccgctgtgaacaggctgcctctgttatatttgtattgctacaaactaaagccctgctgggtatagttttgaatctttaacgtaactttagcattttccattttcccattttattaacagctattcaaaaacgtagtttttaatggctgcataatgttccatattttgaatctaccatcaaatatttacatttctcctataattatattagcattacttttgtcattcttaccatcatcaatactaatagctagaggcttactgagggcttactatgcgctgagcacatatgtgtaaagcatccctggcatcttcacagctacattttgagtagataactgtcattatgtagatgaggaaactgaggtacagaaaggctaactgaattgaccaagggcacacagcaccctggcagagctgagggcttttaactatgcactgcattgaaaacagccttgaatgtacaccactaggcaggtatgtctctgatgaactgaggtctcattcctgaggtagaattactgaggtcaaggttgtgtggtgaccagctatctggattcacctagaactttcccagttttagcactaagggtcctgcatcccaataaaccccacagtccctccaggggtgtgaactgccaaggcacttcacgcccatggccaagttgcccttcagaagggtggtgactatttgtgcctagtggcagactgcagagccacatctctctaggtccctcgaggtcagcttggtttctcttagtagatgctgttgataacattccttcaagtatttggctggggcttttaacacccaggcaatgtgtgactggtggagagaaaaccggtctgcctcctcctcttcctcccagttccatggggtgatctcagtaaattagggacttaggatggaatcggaaaaatgcagtaggaacccccccgcccgccccccccacctccccccacccccaggagagcacaagaggcatatgctcccatcccccacagcccctaacccatcccaggctgccagcaacctccacagccccaccccttgccaaggtgtcactctggccagtggctccagagccacatacggccttggatccaagctgcggctccagctggagactaaccagctatgtgaccttaggccagctgttttaccctctgagccttgtttttctttctttgttttctgctgattggggttaatgatacctttggaggttgctgtgaaggtttctggtggaaaagtgcctggcacagcccctggcacccagtaaatgggtgggttccctacctgactgctgggtcattcagttccccagtgagcatttcatccagttcctgcccgccagccaggcaaccactgttgcatcctgggtactctggtcatcacttgcatgtccaagacatgatcccatgtgtccccggcactccatggcatgcaacggggagacaggcctcaggacagaagtgacggagctgcccatcaactccaaggccttcagaaagtttctcaggtttcccggtcagaattcagggcctgggcagtggccaaggacctggaagagaaagtgcggagggtccaagcctctctcctgtcccacaggtattttaccagctggagggagacatggttctccgagtcctggagcaagggaaacaccgggatgtggtcattcggcagggagaggtgaggccggatcccagcagggtggggaagagaaaggcggccacagctggaatccgccctgtccactcatcctggccctggctgaggtcttgtcctccctaccttttcctgctctcccacaccttcccctgccaacctgccccttccccatccttcctcttccaggctgccccatcctcagcacggtccaacattccctctggttccctggtgtagaggctgggcagagaagagggcccagggtagacaagcagtacccctttgctgcccgggggtcagctggggatgcccaggatgttgggggcgctaaggtctccatgagggattgcagcctcactgtgcaccttatctctaccactgcagatattcctcctgcctgccagggtgccccactcaccacagaggtttgccaacaccgtggggctggtggttgagcgaaggcggctggagaccgagctagatgggctcaggtaaattctgtctggagggctggggcagagaaagggcaaacagcagaggagcacagctccaaactgcagctgaagggatcctagatagactcaagaaagcacgtcctggccactgagtgggcaggagggcctcacagcagaggcagtggagatcctgtctttgttggctgatggtggaggggtagagtggggtggattctgttctctgtgaccccctggaagctcactcagcctgatgaactttggctggaatcagaatctgtgctttctgcgtgaggttgtgaaccttgaaaattcgagacaggtctcagttaatttaaaagtttgttttgccaaggttgaggacgtgtgcccgtgacacagcctcaggaggtcctgatgacatgtgcccaaagtcgtaagagcacagctcggctttatacattttagggagacatgagacaccgatcaatatatgtaagataaacattggttctgtctggaaaggtgagacaactccaagcaaaggtgggaagactcaaagtgggaagggggcttccaggtcacaggtagataagagacaaatggttacattcttttgagtttctgattagcctctccaaaggaggcaatcagatatgcatttatgccagtgagcagaggggtaactttgcatcgaatggggggcaggcttgccctaagcagttcctaccttgatttttccctttagcctagtgattttgggggcccaagatattttcctttcacatttcccccttttcttttttaaaatcttttggagaaagcattttagaagaaattgagtctctggtcccaggttttgtctgatgtctcatggctaggatggtttattcctagacgggtagatcccaagttattagggaagttcagttttagaaagctgtgaagtctcatgtctcacaaagagaaaatagggggaggaagggagaaaaacaacaaccaacagaagagcaatcctggaaaatcgatatagaccacattactctgaagttcacacatcagtaggcaagtatgaaagtggcttaggtacgtaaattggttgctgacattttcttctgaagtttaagttgtcaggcttcagttttcagggctttaagaaagcacagctcagctttcagtgactccaagttaggaaaaacaaacaaaaaaagaagtaaaaaaattgaaaacattattttgaagacttgtagtcaagaaaaattagaattcagtccaaatcacagaaaaataataaaaattgaaaaacattaggcaagactagaatctaacatcaggtatactatagttttcaaaacataatttttctctctccagtttcccctttttactaaagacaaatcatggtaagactgatttgctttattatacttggcctaattatttgtatacagtgcagcaagaataatttttttttttttgagacaaagtttcgctcttgttgcccaggctggagtgcaatggcacgatctcggctcactgcaacctccgccccctgggttcaagtgattctcctgccttaacttcttgagtagttgggattacaggcacccgccaccacacccggctaattttttgaatttttagtagaaattgggtttcaccatgttggccaggctagtctcgaactcctgacctcaggtgacccatctgcctcggccttccaaagtgctaggattacaggcatgagccaccacacctggccaagaataattattttttacataggcttttaaattggctttgatggaactttgttccatagaaggaatctcagataagacctttttttaaagccaagcctagccatggatatgtgctattgaatacctatgagttgggtgatcttcttgaggttccaaggtaaacttgaggcctttgggcgtgtcagagacagggtctttacttaccaaaggtcagaaaccctatacagggaagatatgaggccagtttccctaaagggtttttattggctccataaaccaataaaggaaagcacaccattccagtcaaatccttgataaaataaccagtttctccaattgtgtcctgttgcaaaatgaaaacagattcttattgcacttatgcacataactgtattgccataagttaagaatactcacaaatagcttccaaattctggagaaatcaggtagagagaaaaaaatatgctccaaattttgttcatgggagtatactaaattgttgtgtttttttttgagacagagtcttgctctgtcgcccaggctggagtgcagtggcatgatctcggctcactgcaagctccgcctcccaggttcacaccattctcctgcctcagcctcctgagtagctgggactacaggcgcctgccaccacgcccagcaaattttttttttttttttgtatttttagtagagacagggtttcaccatgttagccaggatggtctcgctctcctgacctcgtaatccacccgcctcggcctcccaaagtgctgggattataggcatgagccaccacgcccggccgggagtattaaattgttaaaagctgtcaatagcacacacaaaaaagtttccttgactctgaaaaaaaacaaaataaaacaaaggatcagcaacatttaaagcaaaagtaaaaaagattactttagtcttctatgagttcagtttacttagtttactcctgttctgcttgatactcatgaacatttcagctctccatgagagtcctgaaagtttttcttctctattctaatgtcacaatctccaaagttatcagaaacctgcacttaagaacacctgtgttcgccgggcgcggtggctcacgcctgtaatcccagcactttgggaagccgaggcgggtggatcacgaggtcaagagatcgagaccattctggccaacatgttgaaaccccatctctactaaaagtacaaaaattagctgggcatggtggcatgtgcctgtactctgagctactcaggaggctgaggcaggagaatcacttgaacctgggaggcggaggttgcagtgagccgagattgcaccgctgcactccagcctggcaacagagcgagactccatcttaaaaaaaaaaaaaaattaaaaaaaaagaacacctgtgttctagagctgattataaagccacctcctaaagagaaccaaaacaggacaattttctgtgaatgacaaaaagttttaaggcagccatagtcaaagacgcagttggcaaggaaatttgttacctctgtggcacacaataatttaatataattatgattattactgatgatgtacactaagttttatcaggattataggagtttcccataattttggaatacataccaataatatatttatacaaatacagcctaaagaaaaccaaacaccatttcatatttggcaatgcttcctgtataatttttataccaagtaagccaaactatgtcattttgggactttagggaacccaatatcttaacagattaattaggtcagaaaaagacataatttatcatttgattttggaaagtttgtcaaatatcaaaggtttaaaactcttgatatcacaatataggatcattcatttaaccaaagtaataactcaaggatttcaaaaaaggtgaaaaccttcattctttgagaagagacttaatgttccaaacaataagctctaataaaaatagcatgaagctgggcgcggtggctcacgcctgaaatcccagcactttggaaggccgaggtggggggatcacgaggtcaagagttcaagaccagcctgaccaacatggtgaaaccccgcctctaccaaaaatacaaaaattagctgggtgtggtggtgtgcacctgtaatcccagctactcaggaggctgaggcaggagaactgcttgaacccgggaggcggaggttgcaatgagccaagatcgcaccactgcactccagactcggcaacagtgagactctgtctcaaaaaaaaaaaatagcatgaacccaattaactatagttttcaaaattatatcttgaccataagatataatttccataaacctttcataacctatatttaggagtcagttaatgcttcaataaaacctttttaatctgacacaggggcccatatgctggtcttgcatcagtgtacctttgacattaatgactaatttatagagaaactgaacttatttatttatttatttgagatggaattttgctcttgttgcgcaggctggagtgcaatggtgtgatctcagctcactgcaatctccacctcccgggtccaggtgattctcctgcctcagcctcccaagtagctgggattacagacatgtgccaccatgcctggctaattttgtatttctagtagagacaaggtttcaccatgttagtcaagctggtctcgaactcctgaccttacatgatccacccaccccagcctcccaaagtgctggaattagaggcgtgagccaccaccacacccagcgagaaactgaacttattttatctctcaaaattggtccttacagtctcccatgcccatctcttacatgatagtccctgggccttgaggagctttaatttctgtccctgtgtttcaggaatgcagtttattttgattggcatcttctactgggcctgaagatggggctttaattgctgtcagtgtttaaagtttagcaggacttggtcaggcacagtgactcacgcctgtaattccagcactttgggaggccgagacaggcaaatcatgaggtcagagtttcagaccagcctggccaacatggtgaaacctcatctctactaaaaatacaaaaaattagctgggcatggtgacaggcacctgtaatcccagctactcaggaggctgaggcagaagaattgtttgaacctgggaggtggagggttgcagtgagccaagatcatgccactgtgctccagcccaggcaacagtgcaagactccatgtcaaaaaaaaaaattagcaggacctggtgtcctttttagacccaggagtcaaagccctgtaacttaatgtcacaaggacattaaaagcacatacagagagatacacagatgtaataaccttaacttttgaaaaaatttaatctcagtttttttcctaagcaaccgaaaacttaataataatgtgataacttgatcatataaaagtttttgggttttttttttaaataaatcctcttattgtgacttacacagaccattcatgctatgcttagactttctggtttgtcctgaacatccctccttcttcaacaaccagtcattttactctacaactaaatttaccatacaagagtctttctcatatgaaattatgtctctttaagctttcttaccacaaaaaacctctttgtttttatgactttctttacatgtcttttatttcctgcttccttttaccttgttttatacatgacctttaaataagccttaaattagataaaatggttcactttttttaaaaggacacacctttttttttagaaagaatgttttcctacaaatatatttttattggaaagtacccaaataatgaaatatctattatttaatttaactttagattctaaattatgacaagtttgtctacaagtatttatcctattgcatttacataattattttaatcatttacttagattatttctaaaaattgtgattgtcattatttaaagttatggaaccaccattgcaaaattataactgagacagtgaaaatgatttgacctaactgattccatcttgcttctaacctccaagctctccttgttcataggctgaactaactttgagaggcacttagtttagttaattagagcccctttttatattttcagcagtgaaacattgtgtacacaacacatagatagacgtcttaggcatgctaatagaagtgcatcttatagattcatagcaacttttttttcctatcttagactttcacattctttttcttcttttctttctttttttttttttttttttttttgcgataagagtcttgctctgtcacctgagctggagtgcagtggcacaatcttggctcactgcgacttctgcctctcaggttcaagcgatcctcctgcctcagcctcccaagtagctgggattgcaggcgcccacaaccacacccagctaattttttgtattttagtagagacaggatttcacnnnnnnnnnnnnnnnnnnnnatccgcccacctcggcctcccaaagtgctgggattacaggtgtgagccaccatgcccggtcagactttcagattcttgataacctgttttacaaccacaggcagttgtcagctaaatagccttaaagttgcatattaaaggaaacaactcgccggacacggtggctcaggcctgtaatcccagcactttgggaggctgaggtaggcggatcatgaggtcaggagttcaatagccacctggccaagatagtgaaaccccgtctctactaaaaatacaaaaaaattagctgggcgtggtggcaggcgcctgcaatcccagctattcaggaggctgaggcagagaattgcttgaacccaagaggcggaagttgcagtgagccaagatcacgccactgcactccagcctgagtgacagagtgagactccatctcaaaaaaaaaaaaaaaaaggaaacaactcaggtgaaaaatcaaataacaaaatttccatcataaggtacagagagaagtcggatggtgctagagggagattaaagatggatgctggctgggcatggtggctcatgcctataatcccagcactttgggaggcagaggcaggcggatcatctgaggtcaggagtttgagaccagcgtgaccaacgtggagaaaccccatctctactaaaaatgcaaaattagccaggtgtggtggcacatacctgtaatctcagctactagggaagctgagcaggagaatctcttgaacccaggaggcagaggttgcagtgagtcgagatcataccattgcattccagcctgggcaacaagagtgaaactctgtctcaaaaaaaaaaaaaaaaaaaaaaaaagatggatgccaagtcaaacataaaattacagaaatctatcacaggattgtataaggataccaattttatttagatagggaccacctatcttttaactagatctctgagctctgggcaaagtccacaccgaatcctgggtctccaaaaagggagaattattatgagcttagaccacgtgatgcttttacagtgcactttaaaaaaagttttttttaaacaaagacatttctaagtatctaaaccacactcttccacatttgatcttagccaaaggcccagaagcgataaaaccacactcttccttaaaaactcaagagtaagagtaacctcagttacaataactattttagtaaaaaaaaaaaaaaaaaaggataacacaatataaaagtaagcagtttaacagctgagaccatttatctttttacattcttggggttccataaggaaaaacagatttctcccccaaaaggagtctagtgccttcttcattttctttaagaaaccccaggctactataaactattttaggtccctcatgcagcagagggtgcaggagaaaggagagacagcagaagtaaatgaagaaaacagaattcagtcaactgagaagaaaaaaacttttgctcaaaaaaaaaagacaaggtcctaggagaaaaacaaaaacaaaaacatgaaagttaaatacacacacacacacacaccccttggatgttagcttttaattaagctgacttttaaccactgagctcctttaaaaaaatctttttaaatctcattaccgtatttcagctggaaaaaaatgctgctgtttcagaagtacagccattgctctttcagttttgcctggctagcaaaagtggccttgtttatgtaaatcaagccccttagcagtcaaaatacaaaatctttcatctttcttttctccttttactggccttttttctccccccaccagacaacctttttttttttttttttttttttccatgacagtcttactctgtcacccaggctgaagtgtagtggtgcaatctcggctcactgcaacctctgcctcctgggttcaagcaattctcctgcctcagcctcctgaatagctggaattacaggtgcgcgccactgcgcccagctaatttttgtatttttagtagagacggggtttcaccacgttggtcaggctagtctggaactcctgacttcatgatctgcccacctcggcctcccaaagtgctgggattacaggtgtgagccactgtgcccggcccttttcgtgtgtgtgtgtgttggtggggagggacgggaaatttagccactccagaggccttgtttcccataatttggaacttctttaggattttatcaagtcaggtagagctgatcaaacccaatgggaaaaagaatgaaacaacaacaaaacagaaacaaacagcaacaacaacaacaaacagtgaagcaaaacaaacaatcgcgcagcttctatgatcactgagcgctctaatgggaaggagaaattaagagcacctgattgttaactttagccaaaacaaacccccagttcagctacttacctagggatgggtctcaggctcaagacaactctctaccatcctagaagcaggaaaaaaacctccttttccctattggatgcaagctcaaattccataaaggagttacctgccttccattgtcatggaagcaggaaaacttgccttccttgttggaaacaagtaaaactccaaaaaaaagggagttgtacagcaaaataaactttagatctcaaccaaatttggggagatcagggattctctagagggggtgctcccacacctcagcaaattgtcctattggtttgagccataaagttagctcacgcgggtaccaagcacccttaggagatttgtctaaggtcaggggcacctccactcagaatgcctctgtggttatcaaaatgtcaactccaaaaatttgagacaggtctcagttaatttagcaagtttattttgccaaggttgaggatgcacgctcgtgacacagcctcaggaggtcctgttgacgtgtgcccaagagagtcagagcacagcttggttttatacattttagggggacaagagacatcaattaacatatgtaagatgaacattggttcagtctggaaaggcaggacaactcaaagcaaaagcaggatgactcaaagcagggagggggcttctaggtcataggtagaaaagagacaaatggttgcattcttttgagtttccgattagtctctccagaggaggcaatcagatatgcatttatctcagtgagcagaggggcactttgaatacaatggggggcaggtagccgggcgcagtggcacacgcttgtaatcccagcacttcgggaggccgaggcgggtggatcacgaggtcaggagatcgagagagaccatcctggctaacatggtgaaaccccatttctactaaaaatacaaaaaattagtcgggcgtggtggcgggcgcctgtattcccagctacttgggaggctggggcaggagaatggcatgaacccaggagacagagcttgcagtgagccaagatcgcgccagtgcgctccagcctgggtgacagagtgagactccgtctcaaaaaaaaaaaaaaaaaaaaatagggggtaggtttgccctaagcagttctcagcttgacatttcccttaatttagtgatttcggggcccaagatattttcctttcacaaggtcttctgggaggggtgagatgtggaaagcgggccagaggggttccaaagtcacacccacctcccccagtgcagccagaactgctgcttccccccagaatttagaatcacggccagtgcctccctcggcttgtttctctaccccagctcattccacaacacacactgacatctggatggcacttgctatgtgccagatgcctggctaaggtctttgcatgtatttattcattgaatcttcccagcgatcctatgggggaggtgctgttatcattacaaagaagttaaagttgctaaagtgttacttgctagatctggcattatagagaaatatggagttagggccaggacagtatagagaggagtgggagtcaacaccaaagaggggaagaaaataggccccgctgtcagcattctgattccatggccggggttctcatttggttctgatcagtcacccaattcttttcctctgaaaggaggaagcaacctattgctcagggaaatagattttccaaaagctcaacagtgtttggttgggtttttttttttttttttttttgatatgggggctcactctatctatcacccacgctggaatgcagtggcgtgatcattatttgttgtattttttaactaaaaaaaattcaagtttcccatcaggtcaccaggaacaggatactttggcctacatcttttgttataataggcatttttaaaatacgtgttgtttttctgattatcaaagtcatacacattcattctcaaaatctggaaaagtacaggaatgcaaagtgaacaaaattaaaattacttgttactaaaaggataaatttgatggtatgtgaattatatctcaagaaaacaaaataataaaaaagggaaaacaaaaaaaattgtcctgtcaccaatgaaacctaatgaaacctaaacttccatcttgtcttatttctatgcttacctatatctttttttacttaaaagaaactcatgagtattctttttttttttttttgagatggagtcttgctctgtcacccaggctggagtgcagtggtacaatctcggctcactgcaacctctgcctcccgggttcaagcaatcctcctgcctcagcctcctgagtagctgggattacagacatgcaccaccatgtctggctaatttttgtatttttagtagagacgaagtttcaccatgttggccaggctggtctcgaactgccaacctcaggtgatccacccacctcggcctcccaaagtgctgggattacagttgtgagccaccacattcggccgagtatttcttacactattaaatcttttcaaaaaacacaatggctgcataatcatttactgtgtaacagtctgttgtagagacagacacgtggtcttatcttctagaaaaaatttgtcacaagggactttaatatagtgagtctgatggagaggatggtgtcctcaatatcattttacagcaaattcaataacacatttcatctggctgcttttgacctttaataaaagccagggactcaacattaaaatgccactccaaaggcagttcccggagggcactgccatccagttatgaagctttctggtggccagctccatcccaggataggatttaggctgccaagtgggtggatgcactgtgtgtctgtaaagcatctcccaccagcgggaccacatctcttttaagagcagacagagctggcctgggcccaggagctgggcttgggcattaggcattcagttaacaggcgttcctggcacccaccatgtgcagcacccacaggggcctggggcccatcccagcctgccaggtgctcctcaggccgggggaggagctcactgagccaggctgggggctggggtgggctttaggggtctactgaaggctatatgtacatgtacatgggccttaccccagaaaagaggtccaaaactttgctccaactctcaaaggcaatcatgaccctgaaagaagaagaacccctaaactgggggacatcttctgcgtgttggcttctttttttttttttttttacttatttatttacttttgagacagagtcttgttctgtcacccaggctggaatgcggcggtgcaatcttggctcactgcaacctccgcttcccggttcaagcaattctcctgcctcggcctcccaagtagctgggattacagtcccctgccagcatgcctggctattttttttctatcttttgttatgcctggctattttttgtatttatttattattattattatttttagtagagacagggtttcaccatgttggccaggctggtcttgaactcctgacctcaagtaatctacccgtctcagcctcccaaagtgctgggattacaggcgtgagccactgcgcccggccatgttggtttcttaagtgtccgtgcactcaggcctagagcactgcaggccagcagagcgtccagccactggccctggtttcaggctcagcctcagcttcctctttgcgaaaaacaaaagaactgcgattagatgctctctaagtttttaagattgtcttgagactggcctgcttccgccacttacaggctgtgtaatccttggcaaattgctcagcttctgtgagtctcagagttctatctgctttgtctagttttgggaaccagtttgggtctagttttgggaaccggagagagccgtgtgaattctcgggatagtagccctctcagggggcgcacgtgtgcttctgaagagcaaggtgttaagtgaccagtgaccactagggtgtgtaacaggggtgagcagacagcagggctctgcagggacttctacaagcagagccaggcctgagtggggctgccctgaagccacccagatggggacagcagggttgcctgtcctctgctctggcaggtactatgtgggcgacaccatggacgttctgtttgagaagtggttctactgcaaggacctcggcacgcagttggcccccatcatccaggagtgagcccccagcccagctcctgcctcttgctttcctggggctctgcatcagcacctgatgccctgggagaaagtctcccctcccagggtggagatcctggcccagagagcccactgccaggccggggggaggggggagcagcagccccgctgggagggaaaggatggcagacacacagctgtgtgagagccccatgagtgtgtgtgggcacctgcacctgaccgtgagtgtggtgtatgtgtgtgtcgctggccactccgatgggagtgctcgccactcctgctcctccctgttcgtccttgcaggttcttcagctctgagcagtacagaacaggaaagcccatccctggtgaggccgctgggaactgcccttctccttccctccctccccttccaaaataggatgggttttggtccaggggaccggggagtctctttttgaatactctgcccagtcctcaaggtactaagaagatggcagccaatggtacctcccacatggctgcttgatcattgagctggatacagagcctgttctggcaattgagacctggggcccctgggaactgggcccactggggctgggtgggctgggtcctgaggacaccgactatagtcatgctgtgggtgcagaccagctgctcaaggagccaccattccctctgagcacacgatccatcatggagcccatgtccctggatgcctggctggacagccaccacagggagctgcaggcaggcacaccactcagcctgtttggggacacctatgagacccaggtaatgtagtcctggggcatccggggcatcctcccacagcagccctggaaaatgggaaccagtctctctctcactgcctctctctctctttcacacacacactcacacacacacacacacacacacacatttcagaggttgtagacatgagcataggcctttgtgctccctccctgacgcagaaggcgatggctctgctccgagtgaagtctgtggaggctacatggtcccaagcaattttatgatctgaattcactttcagagttggaggttcccccactcactggcagcttcctgagggtctgcagttttcccctcgctaggaattcctgaaccttcagccagtcacagccttggaagccaaaagggagagagttgtttgggagtgagggttgggtggagagagggattcaaacaaggctgactttctttcattccacatttattaaatgcctgttatgtttcaggctttagtgggagagtaggatagagttgctaccttaaagaatgtatagtttgttaaagagatggacaagttaatcaacaattgccacaatcatgtgataaagtatcagatagaaaagctataggaagctatagaaggataaaggaggaacccactctgaaagggaagtcaaggaaggcttcctggaggaggtgacatgcacattgcattttaaagctagtgtaggagtttgtaaaagaaagaaagggaggtggagagagcattctaggtgagggagaagcatgagcatgagctgtttcaggcttgaaacagcctggcactgggagcagccgaagttggccagaggcggggcttgggggtgggggtacaagtgtgactggtggactgtggagcagcaggcagggcccaggtcctggtaggtctgctgggctaggcaaggtgggaggacttgtcctaaagacaacagccctccaccaaagtattgaagcaggggagtgacaggccagagtggtgtttctgtaccatgtgtggggacaaggctgggagggcaagagtggtgcagggagacctgtgttcacttgtgctttacggcttgccactggcacatcccatgggctttgaatgagtcaatctgtgcagggatgctcatggccacaggcttcccgtagaggcctggcctgctgctcttgggtaccagggacgtcctgagcttacacagggctgcgagaacatgcgcacatgtcacagcagtaccactcagccctgcaccccacctctgcaataccctgctcttacctgcttcagtttacattaatgaatatgcaccctctccagggcatcagcagcacggccctgcacagtagctgtgtgcttccaggctggtgcatgtcagagagccctcagcctcaccttccttgtcccctcctcctcctgaggccagactcataacctctctcagagaaagggaggtggcaccctctgggaagctgatggaaatgcgtccctcatgtgccctggtgagcatgccttcgcatgagcacacatcagagggaccacgggtgcactgcacgtgaaaggcaggcatgtgtgatcccaaatacctgttgcagcggcgggcacagggaggcctgcagcccaggcagccctcctctccaagtcctggtctctgctcagcacatggtgatggggctgtttcatgggccccaaccctgctccaagcaggcctggtgtctgggggccaggttcaagaccatctcccatgtggggcaagaagcaccagaagtttctgtttcacctcccaccaggtgatcgcctatgggcaaggcagcagcgaaggcctgagacagaatgtggacgtgtggctgtggcagctggcaagtggggcccagggacagggttgcagaaccccctgccagagggcatcagcccgctcctcggccctgggctcccacacggggcccactcttggggccttggggcccaggcagactcagacattcacccaggtgatgaggcccaacagtctccatttgattctcctgctcctcttctccaggagggctcctcggtggtgacaatggggggacggcgcctgagcctggcccctgatgacagcctcctggtgctagctgggacctcgtgagtacgcagggagggctttccctgggatcctcagggtccaactctgtgtgatccctgctcatctgtgtgtccacaggtatgcctgggagcgaacacaaggctctgtggccctgtctgtgacccaggaccctgcctgcaagaagcccctggggtgaccctcttgccatggcctgaagcagccacaggtgtgccaagcaccctcgagtgccatccctgccaaacaactgtcccagcccccactacctctctgtgtactgccgctgtgtcccccacagacctgcacattgttgtcacccaccctcctgcccttctcagcccagatgccatgcccctgggcgggcagcagctccccatcttctctggcagactcagcccactgccttgccagtcttgccaggtggtctacccccggccccgctcctgcccattcctctgtccctgcagactcagtgcagcacttccacaccaagaaggccctcaataaaggcttcctgaggaacgcacacctgggggtctgccgcaggcagtcatcactggccttcccatgtgccccccaggaccatgtggtgtgtctggggcatcagggcaccaggtgaccatggacgtgttggagggtctgttattgggcatccctgtttgtggatgggcattcttcactgtgtgtgtgacttgatccacgcatgctccatgcctggtcctgggagcacggctaatgtcatctctccacttccttctctgttctcatttattctttttactttttttttttttttgaaacaggatctcactgtcaccaaggctggagtgcagtggtgtgatcagagctcactgcagccttgaccctcctggctcaagtgattctcccacctcagccttctgagtagctgggactacaggcatgcaccaccacaccctgttaattttttttttcttttttgtagagatggggatttcaccatgttgcccagtctgtctttttacataactttaaaacactagcatctgttgagtttttttccaataacagaagtcatctgtgctaactatagaaaacccagaaatacacaaaatcccccacccagagctaaccactgttaatacctaaagactatgatcagcctggagaggggcatgaagttgtaccaggagctcagcagtgttggtgggggtgtctggccttgtgtccccttccctcccctgtcatgcacaggtgccctgttcaaagactccagagggacccctgagcctgctatgggtgtctagggatgctggaggcctcagaggcaccagtgggaagagacaagaatgtggaacctgcagcgggcgcagctcagtttcctgggacttccgtgagaagtcaatgagggcatgcacatgagagtgacagatctggacagaacaggtccctgcgtggactcaaagcttcctctagaaaagaacacttgacccctgtctccctcatccccagcccagtggctcactgccttcctacactccactgggagcagagaaagacctgcctttgctgaaaaggctactggccctaagagacatcgggaccttcaccctcctcgtcacccctaagggctttcctctcctgcaagcaaagaaaaaacaccatcaggctccttcaaacacaaatggtccaggataggcacaggcagaggctccacgcggctcgttcctggcctgtagcaatgcactgctccgtgcaggacctgagaagaagacatagaatgttccagggaggacccaggtcagaataccgatggccgtgaagagaagagtttactctcatatgcagggcaagcttaatccagagagaaagtcatgaaaattagatctgtttttgtgaacactcgctctgtcccaaggaatcccctagaagttttttttttttttttttttttttttttttttgagacggagtctcactctcactctgttgcccaggctggagtgcagtggcgcgatctcagctcactgcaagctccgcctcccaggttcacgccattctcctgcctcagcctcccgagtagctgggactacaggcacctgccaccacgcccggctactttttttgtatttttagtagagacggggtttcaccgtgttagccaggatggtctcgatctcctgacctcgtgatctgcccgcctcggcctcccaaagtgctgggattacaggcttaagccactgtgcctggcctataagtttttacataaattatctcattttatcctcacaactctccaagaaggtggtagtgcctgattttacagatcaggctcagagaggtttggaaatagggcagctctgtttccaacccaggcctgtctgcatatggagcttaggctgggcctcaccaccctgcttctcccagggatgtttgccctcagccttgaccaaatgggagcccagggcagccaagagaggccaggggccactgtgcctgggacacagaggccaggccacacatggcagactgctgaccccagccagttggcagtgatggggtcaggccctggagcctggaaccagcacctcccttggccctgctgtcccgggttatcaggagcctgaagccctcatctccacccacaggaccagcccatgggctcatgagaatacctcaccatgggacagctggacttgtaccttgtctggagctagccccagcctcccactccctattccgcagtgaatgctaatgggggcagggagtggagtggacaaggagccatggggagacacagacagggaaaaatcaggattgttctatttgcgggagaagcccccagctccccgtgccatggcagtagaaatttggcaggggcgtccccgtccatggggcctacttcaccgtgtacccggacttgggaccatcacagacttcggaaccatcaggaacctgggagcaactgaaagctgaactacagtgggctttcagacacacagcaggctggcggagcacaaataggactggttccctccaggccaccagcagggcggtggaggtcttcactgactccctgcctacctctcaggacaatgtccttttggctccacagtccctgaagccagagctggtgggggcagggaggcagccaccagcctctatatgtagtggaggagggggtgtccagggagggctgcatgatcctgagagcccccacctcacccggctggactatcctcccacttcagggtttctctgggcttccatcttgcccctgctgagccctgcttcctcctctaccagcagcacaaccccgaggctgggctcagagacctcatgtggtgggatcactcagtaccccgaggcggagggaaggagggagggctgcagggttccccttggcctgcaaacaggaacacagggtgtttctcagtggctgcgagaatgctgatgaaaaccccaggatgttgtgtcaccgtggtggccagctgatagtgccaatcatcccactttgccctgagcactcctgcaggggtagaagactccagaaccttctctcaggcccatggcccaagcagcccatggaacttcataacctgagctctccatctccctctctctcctcctctgttctccctccctccttctctccctcaccctcctctgctccctctgcctttaccactgtgggggggtcctctggagggccctgccaccccacctcttcctcgctggtgtctgccttcctggcaccaatcctggccctggagtttgtcctgggcctggtggggaacagtttggccctcttcatcttctgcatccacacgcggccctggacctccaacacggtgttcctggtcagcctggtggccgctgacttcctcctgatcagcaacctgcccctccgcgtggactactacctcctccatgagacctggcgctttggggctgctgcctgcaaagtcaacctcttcatgctgtccaccaaccgcacggccagcgttgtcttcctcacagccatcgcactcaaccgctacctgaaggtggtgcagccccaccacgtgctgagccgtgcttccgtgggggcagctgcccgggtggccgggggactctgggtgggcatcctgctcctcaacgggcacctgctcctgagcaccttctccggcccctcctgcctcagctacagggtgggcacgaagccctcggcctcgctccgctggcaccaggcactgtacctgctggagttcttcctgccactggcactcatcctctttgctattgtgagcattgggctcaccatccggaaccgtggtctgggcgggcaggcaggcccgcagagggccatgcgtgtgctggccatggtggtggccgtctacaccatctgcttcttgcccagcatcatctttggcatggcttccatggtggctttctggctgtccgcctgccgctccctggacctctgcacacagctcttccatggctccctggccttcacctacctcaacagtgtcctggaccccgtgctctactgcttctctagccccaacttcctccaccagagccgggccttgctgggcctcacgcggggccggcagggcccagtgagcgacgagagctcctaccaaccctccaggcagtggcgctaccgggaggcctctaggaaggcggaggccatagggaaggtgaaagtgcagggcgaggtctctctggaaaaggaaggctcctcccagggctgagggccagctgcagggctgcagcgctgtgggggtaaggtctgccgcgctctggcatggagggacaaggccagcacacggtgcctcaaccaactggacaagggatggcggcagaccaggggccaggccaaagcactggcaggactcaggtgggtggcagggagagaaacccacctaggcctctcagtgtgtccaggatggcattcccagaatgcaggggagagcaggatgccgggtggaggagacaggcaaggtgccgttggcacaccagctcagacaggggcctgcgcagctgcaggggacagaggccaatcactgtcacagcagagtcaccttagaaattggacagctgcatgttctgtgctctccagtttgtcccttccaatattaataaacttcccttttaaatatatttatttgcaagaccaaatatctgtctttaattctaacctgggactatcagtaggcgtcaaagtgagcgccccaaggtgaagggaaacttgggagagagtggggaagccatcccacagccccatcccagggggcactgtccttcccagaacttctgggaagccccggcatgtcctgaaaggcagaactgctttcctgggtgaggcctcaggcaggccaccagggctccaggccctcgggtacagagtttgatgctggggacctaacatccctccccagttccctcaatccacttagcccagccctctcatatcatggacaggacgcaccccagctactaaagtcgtcaggaatagaagtgaaagcccagaagtgtcacacacagaccaggagggtggcatcaagggtccatgtggatgctggggagggagcgagagaaaaagtatcaggcagagggaggtgggcccgggaaggatgagcaggtgagtaccagaccccgcctccaccgtgtatctccagcccacttccctgttctgaaaatctacctgctgcactcagaaacctaccaaggtactggggtgccacctgggccccccccagggttgctcttctgtctctcggctccccatgggcccctcttgccccctcaactcctactgctcccttttactccctggagccacgcctagggggtccctgcttctccacgccctctgtcaccacagggaagggagtccaaccctgggcggggccacctcagcctgagtcaggtcttttaggaaaggcctgcacactcctggaggatggggactgagcagctccttcgggtggatccccacctggggcgccaacacttaccgccagctcaacaccaggcacctttcctctggtaccatctctgcccctgaatgcgcccacctgggctcagggcagctccacgggccatttcctcaatctcctcttccctggacccttctcctaccaactcctccctcaagtcctcgcacctctcccagcacctgccctcactccttcatgacctgatggaagggaaatggacagatactcccatggtttgcaggcatgtctgcagtcctgtcttttcccatcaagggagagagcagaggctgcccttgaggagttcctgggtagatgctggtcacagggttcaggcccgcactcctaacctgccctggattctccttgctccccatcttgaccctgaggactgcttcctcactgacagtctgggtcacaccacccttccccgcctttccatcatttgcaaggccttctctaaacggggttgggtgctccctcgcgaagcaggcttcaggctgccgccacatggaggtaggactgactccctggtccgaactatggccccagcccactgtacccttctctggacttagttctccatctgtgaataggaatagtaatcctggcccttgcccagctccaggggctggggatgggagtaactatatgcccagagcacttggtgaggaaggcagttattatgtggagcagggaagggagaaggaagaggagtgggaagagaaagaaaactgtgtttaagtgtagggtttcctagagatggagtagtaccccgtggtggtataatgggagctgggggcaggcggagaccccatttcctacatttgggttctaaatggcattttggtcccggggacaggctgcactatccagtgtgaattttgggcagcatcttccacccttttttctcttctttctcctaacataatctgctgcccccctgagagaggatcagatggcatgcattaccttcctccagggactcctgagcagggggcaagcaggcagggctgggtgacaggccagcagtcattaacttgccagtgcttactgggcacctgccgtgggccagacactgagctacaaaggcagacaactgtactctcactttgagctccccccggccaagccggggagagacggacctgcaaatggaaccagcgcaatgcaacccagtgcaggccagggtcttttaggtggtgatgcaccctgagagcagaggcttgaagagctgactctgcctgggctgtcaggtaagtcatgcacataagctggatctcagaggatgaggaaggagagaaaagaatggcatccctggcactggaagggcatggccagcgcatgcagctgtgagaagactcagtgtgcaggggtgtggggaggagaccactgaggcaagagaggaggaggcctaccacagagctaggggacaggcaggaaaggcaggaaggaccagatccagaagggccctggtgccaagcccaggagtctgggttgatcctgcagacagtatggcaggagacgggtgtgtgcacgaggttgttaagtggaagatgatgattggtttgcattttcatcagttactctggcaagagcatgagggtaggggacgtgggagatgacctatgtctgtattccaagcaaaggcctgaagaaaggcagcagcagagaccacggagggtccaaatggggaggctgtgtgggggacacactgaggatgcaggtggtggagcaggtttggaggtaaaacaagttgtaggggcttggaagacacccaggcaaacatgtacagtagcacacttcggactggagatagaagcaagggtcttccactcaccagggctatgggaaagaatgtggtcatctggtgagaatgaagagaatcaagaaacatcctttaaaaaaatccctgcaagtaagggacacatgtaggaaaacccagtgaaatgctcagaaaaaaaaaaaaatctttaggaaaaaagcaggactgcagaagaaaagaagtcaaggcaatcttcacccaagtaagagattgcccattaaaaaggacagaatcaagccatcttttatgaaggtaaaagccaaacataaaatacccagacagtctgcaaagtgcctcctgcaagaacagagcattttcaaaagtgtttcctaattacatattgaagagagttgatctgaaaaccagtgtccatgtctgacactgtctggtcaatgaacaccctggatggacaacctggattaacaatgcactgtctgggtctattttttaaaagcttttcaaaaagtgataggttgtcattgtatgaaatttaataatatgcaaaacatgctatcatttatggattcatacatacgcattaattgtataaaatcatgtatgggatgataaacactaaattaaagagagtacttactgctgagatggaggaaaaatgggaagtggcacacaggtgatttactactagatctgaaattaactttgtaaaaaaaatctgaaaaaacgactatgaatgacatctgcatgttacttagcattgctttgggtagagaataaagggattagtgtaacgaatgaagaaaattcatatggctacaacatcttcaaatgctcaagaaagctcaaagaggatgacttaagaatagcattggatttaacaattagaaggtcattaaatgtgactttattgacagcaatttcagtgagtggatgggggtgggggcagaatggaagccataaagtgctataatgggttgaggaattaatgagatttgaagtaatggagacaactcttcccctttcaacaaatgtgccagtaaaaggagagaagataatagctttagatgaaactaagcagaggacagatgttttggtggtttgactgttctgttatttggtggattagatgaagagatttttaaatacaggaggagaagggagaaaagaaaaatactggggaggaggggaatgatgatggggactggaatgtaccaggccttattctaagcattttacacatattaatttttttagtcctgatgagggagattccattattatcccattttacagatggaaacactgaggcacacagaggttgaataatttgcccaaggtcatccagctagtaagtggcagtctggcctgagtcaagacactattgcaaggccctaagggagtggaaggatgaatgcagctcatgggtggcaggagggtctgtccccagaagatagaaggatgcctctttgagctggagcaatggcactatttcagtaggtcttgggacaaggggaataaagctgaagggattcttagaagccgcagctctcaggggataaggacttaaaaagtggcaaaggattggaacagctggttctggaaataagaaaatcaagctcccaacgaagaacatagaaaagggtcactaagcaagtggctcaaaggggcctggtgagttaagcaccctgatgagttaagctgtggggtcgtgagtaggtggtgtggttcctccagcaatctctgcacccaggagcagaatcagaataaacagagggtaaaacctacccagggaggggcagaagaaacctcctaggaagtccgatgataaaaacccagtcctggtatggagcttaaggtcggcccccttgagaggtatggcatgcaacactctaagctacagaggagcttccagaaagagggaggtgatatttgagttcgcattaaaagccttaatttaaaacaaaaaacaaaaaaacaaacaaaaaaaacactaagaaggctgggcgcagtggctcatgcctgtaatcccagcactttgggaggccaaggagggcaaatcacctgaggtcaggagttcgagaccagcctggccaacatggtgaaaccccgtctccactaaaaatacaaaaattagccgggcatggtggcgtgcgcctatagccccagctacttgggaggctgagacacgagaatcgcttaaacccagaaggtggaggttgcagtgagtcgagatcgcgccattgcactccagtctgggtgacagagcaagaccacgtctgagaaaaaggaaaagaaaaaaataagcttagtgtctccttttaagaaaatctttcagaaagcccagcaaacaagagtcacaaacatgtgtacttcacaaacacaggctggaggggtcccaagggagccaagcttcactttcccctataatgaccttggcacagcagctgagacagagtccacacaaacagccagccaaacagcaaaccccatgttggggcacagcagccttcctcagtgcaccacctgaacaccccagcacccatccccacaacccagcactggccacagcagggcacaagtcacactgcagggtagttcacgggaaaaaggctgcctattacacctcatacctccaggcctgggggcacagggtcaaaggcctcctactggggtgaccttgcctcgtgaaacttccatgtccccaggatgtggcttatgagacagcagaagaagatgcagaccctggggaaaggcctctgagagtctcagtgcagctggg

SEQ ID NO: 232 - DNA, 1585 bp, Homo sapiens
caagcgtccaggaagggtctggattctttgtcctccgccgggagcaggccccaccgcaggcgccagtgtgtggggcgccccggagacggtggcggggaccgagcccctgccccgcggagaagcagggggcgcgggacgccgttccccagcgctgccgccgccgcgctcgccagggcctggagtggcgcggagggcggcgggctcagaccaaagtccaccagggggcaaagtccgcgggccccaagcccccaccacggggtcgcgggggtttgctccgcctcgtgagcttgggattctggttaaaaaggcggctgggcggagctgcgggcctccgacggcgggaggacagcgctgcgaggaggcgcccgggacagtcatggagcgccgcctgggagtgagggcctgggtgaaggagaaccggggctccttccagcccccggtctgcaacaagctcatgcaccaggagcagctcaaagtcatgttcatcggaggccccaacaccaggaaggactatcacatcgaagagggtgaagaggtattttaccagctggagggagacatggttctccgagtcctggagcaagggaaacaccgggatgtggtcattcggcagggagagatattcctcctgcctgccagggtgccccactcaccacagaggtttgccaacaccgtggggctggtggttgagcgaaggcggctggagaccgagctagatgggctcaggtactatgtgggcgacaccatggacgttctgtttgagaagtggttctactgcaaggacctcggcacgcagttggcccccatcatccaggagttcttcagctctgagcagtacagaacaggaaagcccatccctgaccagctgctcaaggagccaccattccctctgagcacacgatccatcatggagcccatgtccctggatgcctggctggacagccaccacagggagctgcaggcaggcacaccactcagcctgtttggggacacctatgagacccaggtgatcgcctatgggcaaggcagcagcgaaggcctgagacagaatgtggacgtgtggctgtggcagctggcaaggctcctcggtggtgacaatggggggacggcgcctgagcctggcccctgatgacagcctcctggtgctagctgggacctcgtatgcctgggagcgaacacaaggctctgtggccctgtctgtgacccaggaccctgcctgcaagaagcccctggggtgaccctcttgccatggcctgaagcagccacaggtgtgccaagcaccctcgagtgccatccctgccaaacaactgtcccagcccccactacctctctgtgtactgccgctgtgtcccccacagacctgcacattgttgtcacccaccctcctgcccttctcagcccagatgccatgcccctgggcgggcagcagctccccatcttctctggcagactcagcccactgccttgccagtcttgccaggtggtctacccccggccccgctcctgcccattcctctgtccctgcagactcagtgcagcacttccacaccaagaaggccctcaataaaggcttcctgaggaacgc

SEQ ID NO: 233 - protein, 250 aa, Homo sapiens
MERRLGVRAWVKENRGSFQPPVCNKLMHQEQLKVMFIGGPNTRKDYHIEEGEEVFYQLEGDMVLRVLEQGKHRDVVIRQGEIFLLPARVPHSPQRFANTVGLVVERRRLETELDGLRYYVGDTMDVLFEKWFYCKDLGTQLAPIIQEFFSSEQYRTGKPIPDQLLKEPPFPLSTRSIMEPMSLDAWLDSHHRELQAGTPLSLFGDTYETQVIAYGQGSSEGLRQNVDVWLWQLARLLGGDNGGTAPEPGP

SEQ ID NO: 234 - DNA, 1638 bp, Homo sapiens
caagcgtccaggaagggtctggattctttgtcctccgccgggagcaggccccaccgcaggcgccagtgtgtggggcgccccggagacggtggcggggaccgagcccctgccccgcggagaagcagggggcgcgggacgccgttccccagcgctgccgccgccgcgctcgccagggcctggagtggcgcggagggcggcgggctcagaccaaagtccaccagggggcaaagtccgcgggccccaagcccccaccacggggtcgcgggggtttgctccgcctcgtgagcttgggattctggttaaaaaggcggctgggcggagctgcgggcctccgacggcgggaggacagcgctgcgaggaggcgcccgggacagtcatggagcgccgcctgggagtgagggcctgggtgaaggagaaccggggctccttccagcccccggtctgcaacaagctcatgcaccaggagcagctcaaagtcatgttcatcggaggccccaacaccaggaaggactatcacatcgaagagggtgaagaggtattttaccagctggagggagacatggttctccgagtcctggagcaagggaaacaccgggatgtggtcattcggcagggagagatattcctcctgcctgccagggtgccccactcaccacagaggtttgccaacaccgtggggctggtggttgagcgaaggcggctggagaccgagctagatgggctcaggtactatgtgggcgacaccatggacgttctgtttgagaagtggttctactgcaaggacctcggcacgcagttggcccccatcatccaggagttcttcagctctgagcagtacagaacaggaaagcccatccctgaccagctgctcaaggagccaccattccctctgagcacacgatccatcatggagcccatgtccctggatgcctggctggacagccaccacagggagctgcaggcaggcacaccactcagcctgtttggggacacctatgagacccaggtgatcgcctatgggcaaggcagcagcgaaggcctgagacagaatgtggacgtgtggctgtggcagctggcaagtgatgaggcccaacagtctccatttgattctcctgctcctcttctccaggagggctcctcggtggtgacaatggggggacggcgcctgagcctggcccctgatgacagcctcctggtgctagctgggacctcgtatgcctgggagcgaacacaaggctctgtggccctgtctgtgacccaggaccctgcctgcaagaagcccctggggtgaccctcttgccatggcctgaagcagccacaggtgtgccaagcaccctcgagtgccatccctgccaaacaactgtcccagcccccactacctctctgtgtactgccgctgtgtcccccacagacctgcacattgttgtcacccaccctcctgcccttctcagcccagatgccatgcccctgggcgggcagcagctccccatcttctctggcagactcagcccactgccttgccagtcttgccaggtggtctacccccggccccgctcctgcccattcctctgtccctgcagactcagtgcagcacttccacaccaagaaggccctcaataaaggcttcctgaggaacgc

SEQ ID NO: 235 - protein, 302 aa, Homo sapiens
MERRLGVRAWVKENRGSFQPPVCNKLMHQEQLKVMFIGGPNTRKDYHIEEGEEVFYQLEGDMVLRVLEQGKHRDVVIRQGEIFLLPARVPHSPQRFANTVGLVVERRRLETELDGLRYYVGDTMDVLFEKWFYCKDLGTQLAPIIQEFFSSEQYRTGKPIPDQLLKEPPFPLSTRSIMEPMSLDAWLDSHHRELQAGTPLSLFGDTYETQVIAYGQGSSEGLRQNVDVWLWQLASDEAQQSPFDSPAPLLQEGSSVVTMGGRRLSLAPDDSLLVLAGTSYAWERTQGSVSVTQDPACKKPLG

SEQ ID NO: 236 - DNA, 150830 bp, Mus musculus
  misc_feature (1)...(150830): n = A,T,C or G
cctgacaaaacacatctcttaggtttgtgtagctgccacctgccatctccccaaagagattgaatttgagaggagctatctctaggttagctgccaatttgcagaaatcagaggactgcattgagttagacagaggacataccaggaataaacaaacacaatatcctggttgaagaaaactctgcaggtcagatgggccagagttcctcactagagataaagggataaagacagattaaaggaagaaatagtgtaagatacctaaaaggcattggaaaaatgatgtggctgctgccctgtctagtaatacttactcatttgctaaagctattgaagagtctgtgaaagtcacagtagtgtttcctcagagtctgataggaagttatggttgggatgaggtacacggatagatcttctggccgggaagcttagttctcttttcctcatgataagttcaagcatggtcactttctataacttactaactgtatatgtatacataaagtattttttaaaaaccaaaaaccaaaaagtcgttatataacatttaagtattacagaaaagattaaattatcctttctcttcatcttctgttctgtgtagtaatgtatataagaacttaaataaaaaacaaaattaaaaaataaacaagtgaacaaaaagcaaaagccaaaacaacagcagcaactaaaacccaacaacacggagctggagagatgctcagtggctaagagcacaggctgctcctctgaagacctgggttcaattcccagcacccaactccagtcccaggggatcctatgccttcttctgctcttttggacactgtgcagatacacacacaagatgtaaacactcacacacataacatttttaaaaattaaaaaacgaaaaaagcagaaaactaaaaacaaaactttgtgtgaataagatgtctcagtgggtaaagcctttgccaccaagttagatgacctgggtttgatgcttgattccttggcacacacatcacatgatgggagaaaatggagtcctataagttatcctttgaccttcatgtacacactgtagtgcatgcgaacacacacaccccaaaacaaaacatggggacctgtttagaattctccttttaagaattattctgcttttgctggggtaatttttttatttaatactggtgactaggaaaagtcatagctttattgtttaattagtatttctgtttttttttttaccttggacttttaggaaactaaaaggaaactaaattttgttttgttttgttttctgtttttgtttttcgagacagggtttctctgtgtagccctggctgtcctggaactcactctgtagaccaggctggcctcgaactcagaaatccgcctgcctctgcctcctgagtgctgggattaaaggcgtgcgccaccatgcccggcattacttgggtgttttttaagtagaatttttgacttctgtgtatgtgtatctgaatatgagtacacatgggcccctgcggaggccagagaggacgtctggctagagttggaagtggctgtggctcatccagtgtaagttctgggactaaacccagatcttctgcaagagcagccggggttaagatggcacatggctgagccatctccccagactctagggagttaacttttatcaagacagaatttatagacaacttgaacgagatagttaccttttaaaaggggaattcgataatctgaaaaataaaagattttggtgaaatacagagaagacacagttttaaactgttttaaaatttattttagttttatgtgtattgtgtgtgattatatgagtttatgtacaccatgtaaatttatgtgcctgtggagctcagaatagggcagcagatccccggaaccaggtttatagatggttgtgagcctccatttgggggatactgggaagtgaacctgggtcctctgtaagagcaagtactcttgactgctgagtcatctctccagtcccagagttttaaagagacagcttattttctgagcggttgatggcatttcaccaatgcattcttaggaatttaaagctttttatataggaaagtgttcagctgtagtacagtgtagctaataacagagagctgagctgatgcatctcttcctgtatcatgaagttcagaggcagatgatccagaaatactgccctcagtgtgggaccactctgcatgctgctttagcatttatatcatgctggtgtctatccatgtgtttgctacctcctgtttggcagatatctattgcagctgcaggcatcaagtgggatgatgggacaattgtgttttcatcagaaaaagctaacagaaccccgggcatttgtgcctgtggcccaggggcctgaacactctccagggctgcctttagttggaaggaagatggtggtagcaaggatcctgcttctggctaagcatatggctgacaaaagtcagtattgttcccagatatggaggacagaggatatttaacttacagtgtctctgtctgagttgaagaattcacattactggaggctaatgtaatatgtaaaaaaaaaaaattagcaactcaaaattggtcagtttgaatgctgtgtcagcaaggttctaattaatgtggtatacatttttcacatagaccttcaaagctctctaagaaaaattgtgttttggagtacagaggtgtcagtggtgggaaggggcaggtgatggtgtcacaagatgtgccagagatgtagatagtaaggttaagagtattaaaaaggaatctatatagagaatatgtactgggcttagactttctcctcatgttcttctaaactttatgacagcttatcaggtatgagttattaacccccccccccaaaaaaaaaagctgagtttctgggaggttaagtaatatgtctgagatttagttgcctgggaaatgttcacgctagaactagtgaggtctgcctgatcccaaatcacgtgctctttgtatggcaccagaccctttaaaatgtgatgtttgctctcccctccaccccccaatagatgacctactgcagactgttgagagtacatctggattagctgttattcttttcattaagaccatgttccggccatctgaaaagcttcctggattggtgagtacatcttctctttaggattttccttcactgtgacactttagatggacatcactttttacaatttaaatattttgtttgttaatttatagttatttatttgtggcgtgtgtatgggcacacgtgtgtcatggtgtgtgtatgtgtgtctgtgtttgtgtgtgtgtgtgtgcgcgcgcgcataggtcagcggaaagcttgtggttgttagtttgttccttctttcatgtgggtcctgaggaccaaacttgggttgctagatttgacatgtctgtactcactaagccattttacttgtccgtcaatttttaaatcacattagctgaattttaaaatttatttagcatagttgggattttaacaataggtcttttctcttatgatatttctaaatataaaagtaaagtgagggcagggaggacaggctgagcagagctgcctggaattcagctgtgcagagctaactgctgccagcatgttagggacttgctcctgagtgtttctagggctggttttagatctgtgtgtcagtgtggtaagcgatgactgacattagaactatggaggggccaattaaatacactttaataatattctgaaagtttttttttaaagagtaaactttgcaatatacttaatcatattctttgtaatacaagaggcatatgagggtcaatttctctctctctcttttttttttttttttggtttttcgagacagggtttctctgtgtagccctggctgtcctggaactcactctgtagaccaggctagccttgaacccagaaatccgcctgcctctgcctcctgagtgctgggattaaaggcgtgcgccaccatgcccggctgtgaatttgataatggaaattacatctttgtaatggctgctaacggtctcccctcctctcagtatattatctagaaactcactctgtcttttagcccagacttatattaaacatgtctgtgttctgagatcatgcacaatcattatctttgaatacaattgagttttttctcagagcatccatcttcctctctgcctcatatgctgctcttccttccatagccgggagacgatggagagcttagagcgagttgttctcactttaaagttaggataataatttcagtgcttgtgctgtttcattagttttcctagaatattcaggtttgtatttgagatattgtatataattacgtcttgttttccagatcagcagcttgcttctccggtctgctgagtgcactagcatccctgagtggctcatgaatagctgtaggagcctttgctgtactgatgtgccagcctcaactctcttattcctgtgtcagggaacacttgctatgctggactggcaggatgggagcatgggccccagcggggaggctttgctcttggatatagtgcatgttttgttcaccttgagttcacagtgagttttggctttgttatctcgtattttgttttgcttataagacatttgaaggatacaactaagctaacaaaattaattcagttaaatgtggtaggataagtcataaattaaaatatgtgggaataaaataggcttgtgagaaaaagcagatgatgagaacagaaattactggtgcaggctgatgtggaatgaacatttctaacaatcagtatctatgccagctttctcttctgcttgttttgggtcagtcccatgttatttggaactttgtgaccaaggctggttttgaactcctgatcttcctgcttcttctcccataacaagtgtacactaccacactcaatttatgctagcattaaaaaaattatttttatttcattatgtgcgtatgtgtggtgggtattggcatgtgtatgaagtgctatggaggccagaagagggcagtgggtcccttcgtactagagttaacaggtgattgtgacctgcctggcatcagtgttggaattgaactttggacctctgaaagcatagtctgttggcttaactcctaaatatatcttccactcatgctaccattttagaaaacatgactctgtttcatgagtttcatgaattctaagtaatatagtgtattttatacaaacatagtgcagtttactggatggataaagtgaggttatacagtaagtgctcgcagctgagcatgctgtagtcaggtctcacagagctgagtttctttggtgttgggccattatggatgatgagcaagtatttaaaatgtcaaatagggtctggtgagatggcttagctgttaaaggttcttatcgccaagcctgaagatctgagtttgagtcattgaacctacatggtagaaggagggaactgactcttgcaagtttacttctgaccttggcacacatgcacatatgcaataaataatacataaattatagtaagttttttaaagtcagaccatgaatataacttaatagcagtaagcattactattatgataagaaaaaaagctctaacataatttttacaagttggagatacagtttacatactataaattcacaaatgtaaagggcacaactttgtgtcttcttgtatgttcatgggattgcacaaccatcaccacagtcaacctcagaatgttcctatcttcctagatggtcatgatggtacacttgggaggcagaggcggcaagatgagttggagtgtagcctaaattacccagtgagaccttatctctaaatattttcatcatcctaaaacagtagctaccccaagagtaaaacatggttctccagcctttctcagctgggccctcagattgttttaagatttctatgagaggccagggggatggtccagtggcacagagcatatgctgtgcaaatgcgtggacctgagttcagctctgcagccatacacatgcctgtaaccccagaactgctaagtggagacaagtcaatactgagagcttgctggccagccatcttagctgaaatagccagcttgtaggtcagtaagagacagtgtctgagggaaataagacagagctgtaagagaagacgccaggtatcttctcctgtcctgtgtgcatgcatatgtgcactcacttgaatgccccccatacccatgaaaccatcattacagtacagataatgaacatctcattttgtaaaggtttccttatattcatttgttttttattttataaagtaaaaatattcatgtgaaatttcactttcagtttggccttatttgtaattttgtttttgttgttgtaaatgtcattaaattttttgttcattctttgtatttaaaagtcatagatggggtgggggaagggtatgggggacttttgggataacattggaaatgtaaatgaagaaaatacctaatttaaaaaaaaaaagccgtgatactactttcttttactaggcagcttctaaccatacacatcatggtccacttttcttcaggattaaggagtccacattagaaatgttcctgtctagaatcctggcatcttggaccagttcagccatacagatccttgaatcaggctcctcaggcttaaagggtcatctgaacggggactcatgcgtacctaggagacttctggagtatgtctacacacactgggagcacccgttagacgctctgagacatcaaaccaaagtcatgttcaggaatctcttgcaaatgcaccggctcactatggaaggggcagatttggccactgaccccttctgtctggagttgactaagagtcttctgcagctggaatggcacattaaagggaagtacgcttgccttggctgtttggtggagactcttggaattgaacatattttggcaatagataaaaccattccatctcaaattctagaggtgatgggagaccagtcattggtaccttatgcaagtgacctcttggaaaccatgtttaaaaatcataagagccatttgaagtcccaaactgtcaccaatacctggatggacaagtggcatgagacttgggttttccctgtcctttctgtactgtgtggaggaaacttggatcagagatcttatgtgattgattattacctgccacggatactgaattacagccccgagagcctgcactacatggtgcacattcttcaggcatctactgatactggaactggtgagatagtttttgttttatgaatttctatttaggatacttaaatgtaagcctctgtgcagatgtttgtcatcttctagtttaaatatgtcctctctccccttctataagtggtaaagaaagctgttaatgacagccacttcagattgaaacattttactttcagtagcagagtggagtttttggctgaagtagtttcaaaaagccaagcagtgatttcagttgtaagtttttcttttgtgttttgctttttaaaaaagattgatttgggctggagaaatggctcagcggttaagtgcactgactgctcttctgaagttcctgagttcaaatcccagcaaccacatggtggctcacaaccatctgtaatggaacccaatgccctcttctggtgtgtctgaagacagcaacagtgtactcacatacataaaataaataaacctttttaaaaaaaaaaaaaaaaaaaaaagattgatttgtatgtgtatgagtagtttgcttgtgtgtctatatgtgcagcatgtgtgtgcctagtgcctttggagtcagaacaggccattgcatctgttggaatggagttacgggcagttgtgagctgccatgtagatattgggctactctcttggagagtagccagtgctcttaactcaagaactatattttccaccccttagttataaggttttaatctatttatttttttgttctcaagctagaggaatgctgtctgtattttatatatatatttttttatccaggtgattgagatagcaattaaaaatgctgtaggcaggcctaataaagcagatggatttttgtgtttagtaggaagcacaacttaaagacgaactatgtagtcatttagaattgggggaaacatcccactgagacttgattgctaaaggaatcgtgatttgtaattaatatgtggccatatgtggtagtacatgtctgtaattccagcacttgggagacaaaagcagatgattgcttccagttcaaggcaagcttagtatacacagtgagttccatacatgtcatgactgcatgaaactctctagatagattgatgaatgggtggatggatggatggatggatggatagatagattaaaattacccttttgataaagaaaaaatatatacccttacttgcaattgaagaaattttgaactattggctctgagaggaaattttggtttctttacacaaaaacaatctattatgtaatagtcttttaacagttattcttgcatttttgagcggccacttgaggcttcggagatatgagccgttctgatgctagcttgtgcttactttgttaaggtccctgtgagccacagcgtcccgcaccttccttagcggctgatgctatgctaaaatcagcaagtctctgtagtgcacatttgtgttctttataatgagaacaactcaaaaacgagttataggttagtctttttttttttttttccttcgagacagggtttctctatagctctggctgtcctggaactcactctgtagaccaggctggcctcgaacttagaaatctgcctgcctctgcctcccaagtgctggcattaaaggcatgggccaccattgcctggcttagtctttattttaaaggaaataatagtctttgaacaattacagtgtttctactattcttgtgaaattgtttataacttgtctttacctgatttatttttctctaattcacatatggtgattttttttgtaaatgttaagacctcaagtaaaagtattagagaataagttataatttctttaaattagtaagataattgtgcttacttggaattattggcatgagcaattatctccagtcatttttattttagaatagcactttaattcatgttagaatttaaagtttaatgttaattggatcataaaagttgacacgtcatagtcattgcatagcacaggaatagtctctgctcttatgcttttggaacaagaatagtcttttctccttttagggtcttgtaatcacagaggagctctgggagctttgatggcgtgtctccgaacagctagagctcatggacatcttcagtctgcaactcaggcctgggagaaccttgtgtgcagtgcaagggtaaagcaaggcttaattcaccaacactgccaagtaaggaaacttttgttgcatccatagttcctaataatctgattgctttagtagcccagctagaggcccctgagttgaacctagcactgtcaggagcctgttaaggagccagtagaatgtgccatccttgtactcagtctatgcagtgtctggtggcagcatagacagcttacacaaagaacctacagctcggagacacattctacatgtgagtgtgccctggtaagctagtttatctatctgtaaggcttacgagagcctgaccagggtgcatggtgcttggctgctgtgagctgaacgtggtctgtggaggcctgcagcaaggtagcacaagaagacaagaaagccgtggagcagaagctgcgggagtgaggctttgacctgtggacctgcgaggcctcagttttatccgtgtaatgagatagttttacaggatgtgatacaaggtgtattgactgagcaacctttttgaggcatgtgtgggtaacatggagtttacacagaattataagtattttagccttcttaatttcttagaaaaattaacgtattttcatgtattttaggtgcggatagatacactaggcttgctttgtgaaagtaatcggagtacagaagtggtctctacagaagaaatgcagtgggttcagttttttatcacttacaacctcaacagccagtctccaggggtgcgccagcagatttgctcactccttaaaaaggtagaattttgcatcagcttgggaaaatagtaattgctctagaaattactgtttaaaaaggtcccagatttgggaagagtgtgaaacagttgtgatattgggctaccacctgtcttcatggcctcagagttttgctctgagacaagtttacctgtcggattaaaatccagcacacagaattctttcatttgggtgttaaaaaaaaaaatcaaccctgacttcttaaaaaatataattttaaacattttattcatttatttaggggacaggtgtgtatcccatggtgcaatcatggaggttagaggtcagtttgcaggagttggttctctccatttgccatgtagatcctgggaatagacttaggttgtcaggcttggtgatgcacaccctaactcgccaagttgtcacaccaaccccagcttgctcagcgttggggttcttagagtgtaggtggtgtgaagaaagtgttggtgatgggggaaagaagcacccatgaaatggtaatctcatgagtagcttatctgaatcagacatagtgcatctatggtgaggaattggtaaggtgtaaaattgactatcattttgcaggttcacaccaatttaaaggaaatgggaaaactggtttaattctggttgcagtaatacattgtttttggtaaaactataaagtgttgattttatatgaaaaagaaactgcggatttcaatatttgaaaatccaggctctgtcttagccttaaattgtccttgcaggcggatgttttagtttactgtgtgtgtggcttatatatagtaaaacaaaaagtcctttctccttaaaagttgttttgcaggatacaagaaagttcacaggtactttataaattggaacagagaaaatctacacctgactcagagaacgggtccatcagagagcagccttctgtcactttacagcagtataaggtaggtgatgtacaagacatgcaggcctcagaaaacacacacacttgtgagtacggaccagagggcagcagacagaaagcccttgatgaattgtggctttgtgcttttttctcaagctggaagttatatattccttctgagtctgggcattccactggaggtagcctgagttgtagtatcaaggcaatacttgaagactgtgtcagaatgacgtaactgggctcacctcagtagttcacttcttgtgggccagtttacttttactcagacatttgggtagttgctgtctctaaactccacctcttcaaatggcacaaggtgctgcttggactgtggttcagattgacaactttcagttctgtgtgtgtgtgtgtgtgtgtgtgtgtgtgtgtgtgtacacatgtatgcatgtggaggacaaaggttgacaggaagtgtcttccttgattactttcccccttattttttgagacaggtttctcactgaacctggaacttgttgattgagctagagtggttggcagccagccccaagcatcctctcgcctctaatccaggactgattgcaggtgtgcattccaaccctgggctttgggtgttaccgatccaattcaggacctcagggctacacattcacttgccccatcctcctggcctcctgctgcataggtggccagggccacatagtgagctctgtcccaaacaaccaaaccgtacaaataaggcaaaattgctgaaacagacaaaaactctgaacaacttgattttgaggattaactgagaagaccctctttagccttcacttgactcaccaagtaaaggggcttgctgggcctaccatcttgagttccatgcctagaatccacctggtgacggcctacccatgaacattggcatctgattgcacggcacagtgatatgtactgcccatgtatgaaaacacacgtagtaaacaaataaattgataacaatttaaaaaaacccactaagatccattaaaagtggtttagagtatttaatgcgccctgccctgtgtgtgtgagtgagtgtgagtgagtgtgtgtgagtgagtgtgatgtttattagcctcccttagatcattgctgaatttgaggagaaatctcttttgtttctttctgaaaggagtgacatggcattcatgaactgtcacctccgcccttaggaacataaaaccttgtgtggattgagattctacattttcattaaagcttgtggttcggtttttgcttagggatcttcctttttcctttctttgaaacaaggtctcactatatagcccagggcggcctcaaactgggattcttctagcctagctttctgagagctgtgttatagttatggaaccatgccattagataggcattatttgaacattaggccttagaaacttaatctgagtccctctgtggtagagtgctttcttattatgcatatcgtcatctgttgaatcccagccgaggtgtggcgttgaacatgtggctatgtgggctacataaactagaagtggaagtgaatgcctgttgtctcagtgcttataaggtagaaacaggagcgtcaggaatagaggccaccctctgctacatagcaagttcagaaccagactagggtacatgagactgtcagtaacaaagataatataaactgacaaaggaatatttagctcttgtgagtatgtggaatattgctcatgactgggggccctatggtctaaatatggtctcttaatttattagtgttatactatagttgagagaaggaaccatattgaaaagtacaaatgatagtacaagtatagttagaataagtcttaaagacagtgtgaacattgttttacttcataactaaaatcgggttaaatagatacattttggataggcattctagtcctttgacactccaaagaactataaactcatcaccaaattcttagggttcatgagggccacaagatcaaatctcttaaggttgcacatctaccagaaaaatgaatgttgggtcttgtgttcttgactgacatttggggctctgctgccttccagttgctcagggtaaagcagtgccaggatgcatgatggtcagcactggagttttcagctcttctctgtagtttatgctgtttttacagtagaggaagaagagctgatgataaagcagtagccctttacttgctgttgagaagagggggtaaaaagtctcatgtagcccaggctagctcaaacgcagtatgtctcataagatgactttgacctctgattcatctgcttctgcctcccaagtgttgagattacaggtgtgcagcatggcgtctggtggaaatggagtggagctagaactcagagctttgtgcccacttgggaagcactcttcagagttgcatttccagcagccatcttgcttttttgattaaaagttttctttaaagaaaatcatttgtagaagtagaatgggcgagagtatgaatctcaggaggcaagtagagaacaatctttggattaattgtatcacagtcaatttagtagtctttcttggctgtttcttgtttactctcaaactttggaaagttgtatacctctgatgcctgatgtgcagagaagtcaggattcataaagccctgctatagacagggctgaacaaatcttgttctttctaaaattatgttgttggtttatcttgttgagtctgtgaagacagggtttattaaggtcatgatgtagtttgtgccatgaatactgtccattttatgctgctgtatcaagtccttggggagggtgctttgaaaggatctaggttatgaagaagaatattagtggccagaaagaccaaacagcagagttaagggttcgctgaccatgccatgctatagcagcgtggtgggcacagcatggaaggagcatgtggtcaggagtgaaggcagtacagctagctgagaaaatagacctgtagcatagcactcctgccgtggaaactaatagtgtgattcactcctttgcccagggttggcgccctctagacctaattaccttccaccaggccttgtctcttaaagccctggcctcccacctatgttaccccactgggggtcagacatgaagcagaagggataaactgtccaaactgtaggaggtgtcaagctgaagagtcagacagctaggacagctcagcagccttcccctgatcagatagagcaggcacatttacttctgaaggaacccagctacccagctgctgttagcttaattatccttaactgtaactgttcttcattttagaatttcatgtcgtctgtttgcaacattctctttgaagcattgtttcctgggtcttcctactcgactagattttcagctttaactatcttaggatcagtagctgaagtgtttcctgatccagaaggtaagcatcagcaacgtcgggaaacatacactctgttagcatattgctgtacttgacatttggattttattgtttctatatagattcccttttaatacatagctctcatttgtgcataattaaagttgctagtgaagggaagtgagagagagagagagctgtctcctcctgtttgtcactttccaagcgcatactaaacctgggtccttggtgtgggtcttcttgctcaccacaccaagactgcctgatctctcctgccatgtttatttgtgctggtataagtaagggcttcatctcttaagtttaaaatgaaaaccataatggcttatcttgtatttaatatataagatgaatgaggctttgtggttaaaatgtggtttctcatatatgccatctgcttgaagatttctacacttttagaaatcacataaaataatacaaaaatcattacataccaacaaattaaattatctatatgaaatgtacattgattctaggaaatgcttttaaatcttaaatatatggtccaagtccacaccattgagctctgctttttaaactgctgcggtggcagtggaggtgtgagaggcaggaggtttactgcaagctcattggtaggttccaggtatgtggtctccgtagttcctttgggtttgtaatttttgctcaaaacctatcacttttcacatttttaaagccatagtacttggttgtcatttgaagagatacagttctgcgattgtgcatagtgtatgttgtgtaaagtacaaagtgaaatcttaactgtagatgaagcaggaagtatgaatttttgtattgctcttatataaatatttggccatatagctttgggcagtttgatttttgtttatttaaattttaaggtaacatccaaacagtgtatcagctgagtcatgatattgatgctggccgttaccaaatacttatggagtgtttcactagtacttttgaagaagtgaaaaccttagcatttgatcttctgatgaagctgtcgtcagtaacagctggacagttccaggtatttggactttatctacataaatgtgtgtgaatgcagaacttttactttaccttagggaaagcagtcaggattgtcccagctctttgccttctacatcttttggatatttattgcagttgctatctgtccttgctctttcgagcatgggaaatggccaaatccacacggcagtggggttgtgggaggcaggaggtttactgttgtcaagctcattggtaggttccaggtatgtggtctccgtagttcccttgggcttgtaattcttgctcagaacatatcacttacagtcattttgaggttttaaagataatctcccagactagcagaccaagaagctgagtgtaaataaggcagacaatgtgctctggtcttccagtaagcagtagctaaaccgagactgaaacctgagaatctttgaggttagctgcagttctctgctgacacctcagccctcctccacctgacactactcttcctgccgtggcaggagacaaagattgggtaggggtatagagtgagtatagagtgagtatagagtgagtatagagtagagagtgagtctacaggggaaccctagccaggttctcttcctttccttttatcttactctggggatgttgggtcagcagggacatagagggtgttgaactttgtttagccttttattaacactctctagaggccaagggtcctgtggggactgcagctgttaggtatatttagggtatgaaggtacagcctgacatcattttataggtgtaagattcagtggagcagagatgtacaagacagcagtgttgttgcttctgtggtttggtatggcattgcagcatcttagggtgtcactgttctgactggttccaggttaggagttgttgcctgtatccataatcttttcaggtaccttagtgagcagaaggttcttggtgctcactgctaaactcttgtgtcctataagaatttaatttagattttcttctgtctgcaccatttcctttactggttatcacatgcagccttttctcatatagattagctatgcttcattgattattcaaatggtttttgagaggatctgcagtgagaaagtaaattattgagaggcctgcttcttacagaccctgtgcagggcctggagaggccctgtgtgcctttcatctgtaaacatgtgcttgtcccagaggtactgtagcattagaagaaactttgtctcacatgggtgaagtcaggatcttggttacagtatctggtcttgttgcatgttagtaaaatgattgacataaacatttaagacttgaaagtagggcaggcaagatggttcagtaggtaaaggtgcttgtcaccaagctttgtgacctgggttttttctctgaactctacatgatagagggagaaaaacagttcttttcgttttcccctgacctccaagtgactactatagcctgtgcatatctctttcatctccctaccaccccccaaaataaataaataattaaaataaaagaattgatcacctcctacttaaaaaagacctttaagatatggactctgtatttccctaatttttgaacagtgcctttaacactagcttaacagctgtgtatagcgcatgtctgcgatggcgtggctttttgacacatgtccttactactcatctgatttacttcccatctttttaaagatgtattcatttattatatgtgagtacactgtagctgtcttcagaccctccagaagagggcatcagatctcattatggatggttgtgagccaccttgtggttgctgggatttgaactcaggaccttcggaagagcagtcagtgctcttaaccactgagccatctctctagcccccctacaaatctatatcttaatggtacattaatattttaagtttttgaattacattttcatgtatttttttttcctatgtgacactgtacgtatgtatgtgtctgtgtgtcggtcaaaggacaaatgattcaagttgattgattcttcttcccccatgtaggttacagttgttaagcgtggtaccatatctagggttcattgtattaatattttgatctaagtggaataaaagtgttctcagttttaaggctgtttattttgcttcttactgatttatagggagggtagtttaagatttactctaagccggacgtggtggggcacgccgttaatcccagcactcaggaggcagaggcaggcgaatttctaagttcaaggccagcctggtctacagtgtgagctccaggacagccagggctacacagagaaaccctgtctcggaaaaaaaacaaaagaaaaaagaaaaaaaaaaaagatttactctaaggtcaagtagtaaaaaatttagagataaactgacattacagttagtacacttgcaatctactgttttgaaattgttagtcaccattaaatgtcattgtactaataatcaaattcagagataagtttttaactctttctaatagatagttatgggacaatcaaaaacgaatcataatattgatcaactaaacactgatgttcagagtactgagcacgtggcttgtcagctgtgtgattgggactgggatccttgtgtcttgttgccaatccagtgactttccctagttgttacagtgagttttcccttgttctgttttcttacttataacacactgtaggaatttggatgccagatttctgaatcttatctggtcctctgttctccactcatgtatggagttttaccatgaggagccttattatggctgtgtcattcaagcaaccagtgctgtggaagggaaaaagaaaaaggacaaggacgtggtgctcagacagaacatacactgggagaaacaatgctgactaaagcctgtgctctgagtagacatgatgacggtggcacagctcggaagtacagcaaacgcacaaaggaaatctgtttcccgttgagtttcccaatgaaatgatgttaaaggtctttatctctaaagtggtcagtgatgatcaccaagtcctatggcagaagtagcctatgttcatagagaaaagcaggcttgcgcattactgttcatattgagtgtcagccagatggtgggcattagtttaagcacgtggttccttcagggtgctttctgccatggtgaccaagactgtgctcatctctaggattctgagaagctgcaagacctgttccaggcagcgctggaactcagcactagcaccaagccttatgattgtgtgacagcctcctacctgctgaacttgctgatacggcaggatgctctgccagccgtcctgtctgcctcttccccacagcagctcacacgtggagcaggagagacgtctgctgtgctggaaaggaacacattagtgggtttgtattgagaaagtgacctttggctgtaacttagcaaaccctctgtttcattttctatttggtcagtgctcattggcttaagagtcacttgttgttatcttaagagtttatcagcacagaagagaaggcctgcattattcatgcaaattaacagtttactcacctttaccacctctctctctctttctctctctctacacacacacacacacacacacacacacacacacacacacacacacattttgtttttgagacagggtttctctgagtagccctggctgtcctgctgtcctggaactagctttgtagaccaagctgacctcaaacttggagatccccctgcttctgcctcctgagtgctgggattaaaggtgtgagccagcaccacctgactgacctatttcaaaacagcagacttatgctaaataagtacacaaatgtccattaatgagacacatgttctaaaagggcaactgttttctttctcagctcttgcctatggtcgtgtttctgtggccgcagttagatcatcctcattgcgactgtacagagctgagttaatttgatgttcagcattttcctcaatcacttctccaccttgttattttaaattatttttaaaaacattgaaacttaagtgttgtgtatgtgagtgtatgcctgtagtgtgtgcacctgtgtgcacagaggttagagaagaagattggtgtcctgtcctatcactctgttttcttcccttgaagcaaggtttctcactgaacctgtagctacactagtggtcagcaagacccagagatcttcctgttcatcttccacagtgcctggccatgctcagctctgggatttaaactcaggtttacaggcttgaacaagatagcatcaaactgtctctccacccctccaccttaatttttgagacagcttctccattgaacctgggtgctgtttctgctgtactggctgcagaatctgcctgtctctgcttcctaccccaccattgcagttacaaacatgtatcactataccagtcagtgctggcgattgtaactaaggtctgtgtgcttctgtaaggagtcagctctccagcacccaccctcctattattcctcctatgtttgaataggatttcatgtagcctagggtggcctgagacttgctgtgtagtcaggggtgaccttaagctgctgctcctcctgccttcccctcctgagtgatgggatgactggcatgagctaccatacccatttttctgcatggatgtagcagggattgagcccaggactttgcacatgctcagtaaatgaatagcaagtgcacggagcagcagcactcagtgccaccagccttcagggacatgcagaccagcagcacagagagggaaggcttcattccaattgagatggttaaagaaacccaaattgtaaaggttaattaggttgaggaggaactaggatatgtacttctaggattgagggcaagcactcagcctgtaaataactagagaagtgaaagcataaggagactacagaatgtccatagcagcagttttcatacttgtctaaaagtggaaataagccatgtgcacatcagggaaaagtgtgttagacctgccatatgaaagaatgaagtattgatacagctttcatgaactttgaagacatatgacacgtgattgtacccagtcatgtgttcatcttatttataatatgtctagaatctttgttggtgtgtttgttgttttcattttgagttttttgtttaatttgtttttgtttttcgggacagagcctcacggagcccggcaagctgccaggttactgtgtagccgggctgttcctgagctcccacctcagctcaccaaaggtctgggctgcaagtacatgtcagcacatttgctaagaataggaaagtgtatgtatagggacaaaatagatcagtgcttacctacagcagagcatggtggagctgccagagaggagtgactgctgctgctgctgctgctgctgctggttaaagccttttgttttagtttgtgtgtgtgtgtgagagagagagagaaagtgagtgtgtgtcagcagacagtaagaatgctctagaaaaattgagttttacactcttaatttttttattgcatttagtgtgtgtgtgtgtgtaagtttgtaaccatgtggctgtcagaggccaacttcagcagctaattttcttcttctactgcatcggatctgggaatctaactcaagtcatcaggtttgactgaaagctcctttacccactgagtcattttactaatttgtacacatatgaattgcacaatttctcaattgtatcttgattatactgttactaaatactatttttcggccacacagtcatactacatggtcctgaagtttgacacccgggtggagggtatcgagaaggattggttcagagtgcatgtcatcactaactccagcaattaagggactgcattccattctttaacattgccttaattacaagttggtaacgggctgataccccggaaaaatctttgattccaaacctctgaaacagtgacttgggagacagctcacacggtgcagtgcatgctgtgcacactgggtgacctgagttggaatcaccagctatctgtgaagggcaagccaccttctcagagctaaccagccagccaaccccaccgaagcagtgagcccgaggttcagtgagagagcttgctttcagagataaggtcgagggactggagaagacacccagcactgacctctggcttctacttgtgcagatgtacacacaggtgcaaatgtacacacagacacacacacagacacacacacacacacaccctctaatataacttatagttgacctgagtatactctttctctataaatgaattataaatgtgttttataactgaggccatttcagttttctgcttgctttttttagttattaaatgcttgatggaaaaccttgaggatgaaatatctcaagctgagaactctctgcttcaggctgcgtcttcatttccaatgtatgggagagtccactgtataacaagagcttttcagaggttgcctctaaagtaagacttcacagctatatcttgtttgagaaatagacttaatgtcctacctttagcttctcactggagtgtgtcttgggaaaagaatagtacattgccttaagaagaattgaaaattagatgtaatcatatacacgtgtttttaagttctttatatttcatacataactcatgtttgagccccagattctttcaggtccttctttgtgttacttagtgtaaatgtctgtactgtgtttgctgcagtgacctgcggctggcgagcgagtggaggccactgctggggaggcttctgctgctgtcctacaggctttccactgtggtggcccctgtcatccagagctcctctcctgaaggcctcatccctgtggacactgactcaggttagcaggcaagggccagtgcgcgtctgtctccatctttcccttactcgtttctttggagagatacagaaactaaattcagggaagaaccttttttcatgctatttctcatttttttagtaatctttgtaactattaaaaaatcacccccagcaggagagactttttgctcagtggtgttgtcactggtaaggtgaccttgttcctgtaaacaaactcactcatcttcctgtagcaaacttagtgtaagcattgacttaccctaaaggaaaaagagagagccgtgaagtagctgagggacttagtcgggataaagaagggagccacaggggtgaggaggacaagagagggcagtataggtgaatataggcaaagtatgctataaaattatacaaacattggtatactcattatggataaccaacatctattggattaaaaaaatggtgatccagaattgaactcagacgtatcatctacctcttccctcccacaccctgcctcttcgcatatgttcctgctgtgcaagtgggggctttgggattgcttgacagtctctgcaggtgccccgtgcatttcatttgctcttaaaaactcctacatctcttttcctttttctttgtatcttctcaccctctaggtaatttatggttttcttagattattctagatccttccctatggatttccctgcattctttctaataaagtttaaattacttttcctaatcatataatttatcgtttgaataacacatagtctttaacctttggttttgtcccactttgagactttagtgccctcccgccgtgtcctggagtagcttggctctctcaccgtccagcgtgtctcctagtctcttcctaacagctggccttcatggagctaacgttcatggaacgaaacatcagcactagacatcattgttctgtttttctgactgtgatgaaaatcaggaatgatcgtgatactaaagcagagttaattattttggcccatgttattctaaataccaaattttcatcctttagttttcctacttagtacataggtcaaaggagtaaggagcacacgggcttcttgctcgtccagctcaggcgagtactgggggattctgactgagcgatttcgggtgtttctgtttcctgatgttgatagtgtctgtagagcatgtcatacttactatattattattattaatgtagatggggaggatctgggcagatttgggagaggggaagagaatatgattaaaatatattgcatgaaaaaattaaaataaataatttaaatttaaaaaaagttagtctcagacactatattgacctcacagacttttcttaaattctgtcttttcttttttccttcatcttttttttttttttttttttcttgacacttacctgttatagggaaccccttagtaaaaggtcttccctgagagccatagatagatgatagggttcctaaacttctgttctggtcgtttttttctttttcttttctgtgctctttttctggcctttgtggggaggtggtggcaaatgggtagttatattattttcctggctgttaaaattttgacaaaatttcaaggaagcaacaaacaagcctaagatgttggttcagtgctccagacagttagagcctgtgtatttcccacagggcctgaatacatgcatgccatcttatatctcctcctaaattgttgtgttccttctgtgtgatcggtttcctgttggtcctttatgaaaactagtacttgggtggcttactgcccatccgtcacccattcattcagcccagtttcttgcacctctgtggagccaggtgtgttgtaggcactggtaatgcagcagcgagcgaagggccgccttcctggagtttactcatttccagacagggcctcagaggtgaagagacccttcaccaagcattagcactgggcaccatgctcttctaaactaaataggaaatctttatacgcctgtgtggccttgaggttacttttttagatattaaaacacagttttatcttttaatgttggtatcttatatggtgagctagggaaacaggctctgctgtcttgccacatgcctaagcactgtacacaagtgtctagataactatgaaaaacagtgatggcaacctttgagtggtaggtgtttgatctttgttttgggcacatcttcagtgtaagctctcatatcataagcgcgcacactgatatcatggagagcctgtgtaagtaaggaactttcacattgcccatcttgtgggtatagctgactgtcactgttaaaaatcatggcaactgtgaattagtctgaggaaatctgcacatgacctcgaactgagcgttcatgcacatttatcttttattcagcgtcagcaagccgcttgcagctcattctcaatgagatccagccacgggatactaacgattacttcaaccacaccaaaatactgaaagaatgtgatagctttgatttggaggacttgagtaccagtgtctcaaatattgatagttctgcagaagttaaaggtaagatacataaaactgatagtgtaatcagtggtgtgtgtgtatatgtgtgtgtgtgtatgcttgtgtgtatgtgtgcacatgtatatgtgtatgtatgtgtatggtgctggggccttgtaaggcattctatgtagggttgtactgatgagcctataccagtgcacaccaactgaccacaagtatttcagtaatgtaaaatgcacactttccttcctaaaaattgttttattttagattatgtgtatgtgtacacacctacgtggaggctaggggtatcagaatcttctggagctaaggttacgggcagttctgagttgtctgatgtggatgctttaacctcacttgggaaagagcagtacacactcttaactgctaagccatctgtcttagttagggttttactgctgtgaacagacaccatgaccaaggcaagtcttataaaaacaacatttaattggggctggtttacaggttcagaagttcagtccattatcatcaatggtgggagcatggcagcatccaggctgtcatggagcaggcagagctgagagttctacatcttcatccaaaggctgctagtggaagactaggcaactaggacgggaatcttaagtccacacccacagtgacacacctacttcaactaagtcacacctattccagcaaggccacacctccaaatggtgccactccctggcccaagaatatacaaaccatcacaccgtctttctttccagcctcacaaagcccttttgataatataagaaagcgcagatttgcagaacatttctgggaaacaaaatttttttctttttaatttgggttttggaatgaatttataagagccttataagaaaatggtgtgccttacttctacacagatgctgctataacacatagcttttgagcataagaccctttaccagtccctctgatggaagagcagggacacatggtgatagatttgggcagcatcaccacctccctgtctcactgctcactggcatctgctggacaatgcttgaagtgagcatccttttaaaggaaacctgacttctgagcggagcgtgtgcttctgtgctacagcaagtgtaactgtgcttttgggctactttattgggttcttctgtctgccatccttctcctctccagtcccttctacccccagcactggtagaagaaaagcctagatggggaaggggcatagatctttttagactactttctgatgattaggggcattgagtttctaggggcaagtccagtctttgtaatcaggatatgtgcaaccagcgatccagcaaccagcaaaatagcagtgcagggcggcagcagcgggagcgggagcagcagccgccacccttctcagacctctggcattcatgtaccctctaaagagtccccagaattccaaatataacctagcttcagctggcagaatcccacgcccctgccagagcacgagacaaatcctagtcaactgctgcagtcagtctgaaggagccccagagcccacacctgggattaaaaccaaagcataatacaactgggtttttaaagaaaccaaaattctcactaaaccaagtctctagaattccagcctgcatggcttgctttattagtagctactgaaaaaatttatcgatagaagtgacttcttaatgatttatcctgtgtctgttttccactaggtggagttattaacttgcaaaaaaattctctttgcaattgtttgttttaaattacaaaaaatatgttttcagtgtaacagtgaaatatgaatttaaaataaagtcatgtccattccctccccagttctacccaccccaccccttttgtgtataagtcattctgtgcatgctgtgtatttgtaagtacatttattcttttagcttagtagacttttcttataaaatcaagtaagatagaataaactcttgttaacttcctttttcatcttaatggaactttgtaaatatcagtgctaaaatacacctaaaacctgataagatgataggtaggaatacatttagtttatttgccatgtttataaaatatattttgaaatataattggtattttctgtgtttaattttaagagttcgtgttgaagctaaagacatagctcagcagttaagagcactggctgttctttagaaggatctgagttcagttccagcaccgacatactaactcacaactgcctgtaactagttccagggatctagggcctgcctttggcctctgagcaataggcacacatatgcacagatacacaagcaagtaaggcttgcttttaaatgagcataggaaggaaggaaggaaggaaggaaggaaggaaggaaggaaggaaggaaggaaggaaggaaggaaggaaggaaggaaggaagggatacaccctcacctacactaaataaagtaagtaaaataaaattgtcaaaaaaacaagagaaaaaagtccgtcctcagctagttctggaggcccacgctgtaatcctgacacccaggagcctcagcgaggagtgttgtgagtgagtttgaggtagtctgggctacataaggagacccctgtgtctaaaaaagcaaaaccagaaacagcaacaaaagtttgctccattcctcaattgataaaacagccattctcaccaaagtaaacacaaagtactttcttttatagccagtgtaattctttatgggtaacagagagttggaaagtttgtttcattaacattcaaatattagtcctaagttttgatgaagtactgtttcattttattgtttttgaaagtaacaagttgaagtcagcatgcttcctgttcattagcatgtgctctacaaatgttagtgtgttttgttttgtttttctctgaataaacagaacatatgcagatttgtttgttcaaacgatcagtcttggggaaattatgcattgacatgcttaaaaagcctggcatgtacaatagcttttgttttaatccttaaggtaaagaagaaaaagcgtgtgacgtaactgctcagatggtcctcgcgtgctgctggaggagcatgaaggaagtggctttgcttctcggcacgctctgccagcttctccctgtgcagcctgggccagaatcttctaatgtgttcctaacagtgcagcaggtgaggttcatcgctctacttccaggtggcatttgtggccaaggcacaagctgctatttgtagaccacaaaaaaaaggtttgaaccttaaatattttacatgtgccaactgagaaaggttcatgaagattttaggatagtagatggtgcactttattttaaaaatgtgttattttaagaaatatttttgcatcagtaactatagatttacctcatttttgactgcaatatttttttattcctttttttaacatacataaacttgaagtttagctgaaaatgtctattttgtaagactccacaggcctcttaaaaatttcaaagaagtaaaaagaaacattagctgatcatggctctcatgtttcccactacttcagtaataaagttgtagtcactttagtgtttttggctgactttcatttaagaccacaaagttagcccagcatctgggactgttcaagggatcgagtgcagtgtttacaagaaattagcttaccacaagcatttcatttggaaatattttagatttattagatttctgtttttaattgattccttcttccttttcatatggtttcaacaaatccatttcccacagtttcccagcaaagatgtatgtactttcatttttaaccttttcaaagaaagataattcccccacccccatagggtattagaacattcaagtacaaaacaaatattgtagtatgctaatgtggattatccctacagtaaccacatgactagcaccatggaaataatgctaatatttttattctcacactctggctcatgtcttacatctggctaacagctgggccagtgatgttgcaaggccttggaaaaacagcacagggcaaaggcaagcagcacattgggggcagcgtctcctcagtctcctcagatcaagcaggccttgctgtcccagccttcctgggagctgttattccagctggctaaagtgccattgcctgcttctggccgaggaatccagattagctatttcactagtgtgaatgccccatctccttacgaagtaaacacaggctaacatcctttgacttgtcaacttctcttttcaaggacaaattaaaggaatgcattttgcttttgattataaatgagaaaggcttggaagttctctatgaaaattattatgccttgactccctccccaccacacccaaagtttatatattataatgaaattatgtggaacagctatgttaaaattgagaactaatataaagaaaaaaatttagaagaaactaaaaatagcaactacacaaacttagaatctgaagaattctcccgtgactgcgcgtcagtgaagagactcctgcccactaagagaagcaccactgtcggacgagctgcctggtcttccacatgtgacgggcttttacatgatagcctcataggaagcggagagaagacatcacaggcttggggaagggtggggtgtaagtaattgctgcgtgctgactcaaactggtctctgtgaaaacctttattctcagttttgttggcttttaaaccactgtcttagcttaggaacatttaatccatgaaatgctgccatccagaaagtaatgccatttacattactataggatttctgtttttctgaacataaaattgcttctttaaaaaatgttttttttatttaaatatttcagatttgattattttctgggtgtttgcttgcatagaactatgcatcagaagtgtgcgctgtgtctgtggaggccagaagagggcaccaaatcccctggaactggaattccagatggttgggagccaccatgtagatcctggggactgacccctgggtcctcttaccagagcagcaagtgctcttgacagctcgtctagctcttcgtcatattgacttttgagacactgccttgttattgagcccaggctggccttccaagtactcgaaccacagcaggttctaaattctgcttttataaataaaaagtgattgcatatatttaatactttcaagaattagtttgtatcagggtgactggctgtacctaaggtaaatctgcacattcttggtgccaagaacatagtcacttagcaaagctacctttgctgtacatgctgacaaaacccaccaacctgagaggtcaccacttagataggtgagtgtgaacctagccgacttctctctgtaaagctaaaacagcagcagtcagcctgagtctccttctcacctccctcttacgttctgggggtcctgcttttgttctcagatcaccctgctttctgaccttggttaaggctgactactcaaggagcgcacacaggaggatgattataaccacggctgacaggaggcaggaggacaagttggggactttgttgctatatggagaggagagctggtgcttattttcaattctgagtttttaatgcttggttcattgaaggcgctttgctgtgatactccccagctcccttcagtatgaggaaatggattcattacctgggctgacaaagatcccaaagctaatttctgcctctgtccttcccctcatgggttcgcgtggcacagtgctccctttgttctgagtgactcacttaggttttctttaaggtgatttccccttccccttccccacaccagctctctcaaggcatgaaagataactttctactggagttttgactacctgatccttcctatagagcatttcttgtgaggcagtgtgctctcccagcttcttcaagaggaaattgttcccctggtggcaggtctgactgtcctgctctgtaatcacacaatgaaaggttcttttatagtgtcctgcgctggtggcagagataaagctgctttgagggctgtaagctgagacccttcaagagtgagcagtgcacacaagcttatctcagtgtttcctgactcactggtgtgtgtctaggtttcgagcttgctgctctgctgacagacctgctggatattttgttggccctctttccagtgtgatgctgatactgatctttaaatgcctactgaggttttaaaataacttctgtgttgaatatcaatttctctgtagattccacctagtgtttctaaaaacaggcttttgggtacgttttcttcacacttgcttgcgtcacactctgtagtagttgttcccacagataccctgtgaggaagtattgccagctggtagaaccttctgcttcagattctggtgatgcgtgggtgatcggggtccttgattggctgggtgcatttcctctgttgtgtcattatttaatttttttgtgattgattacaaacggaattcactcattagtattcataagtcacaaaggaattgcctgttttattttgtttatattagattttagaaattatgagtatattgagctctgatgagtagaagtgttaacttttaaacttcaggagagaccacatcatttagtcgcctgtttactgactgttttactgcatgggtgttgtgggaacacagagaagactcagatgtggttttctgatcacccagagctgagttatgcagcgaagcagtgcctcacttggagaacccaggcctgaagggtaacagtcagacggtctgtgctgagcatttgctagaacaaggaaaatagaccttctggtaagacggtgtctgcacaccagaaagcctttataatgatatagaggaacaaagcttagattttgaagaaattctcattgttagtaagaaatgattataatggagcaggattgcttttaaacatagtcattttattaggctttaagtcctgtggagcgtctcatgtaaacaaaatggaattagagtcttccagctggagacagtcccaacattataagaaatggttctgttttaaactcggaatttaaattaaggcttactattttatagtatactgtcaaaccaaaattagacatttatagactgctagtttatctgatggtaagctatagatgcctggagacatagcaagtagctgttctcccctgtggacttgtgacctgtaaatctgtaaaacattgctaatttgctttagggttttataaaaagtcagaagtagaatatgttaaatttaaagggcagtgtcatgtttaattttaagattagaaatcagtatcttctttttatttcactttagctttggtttccttcagggtccctgagagctgtgtatgctggcttgtgcctgtaatcctagtacttggaggctgaggcaggaggatcatcagagagtcaaggccagcttcagctatgtagtgagtttcaagccagcctgaactgtaaatgagaccctggctcaattaaatataataataaaatatccggggagaatttttgtttttttcctcgagatagggtttctctgtatagccctatctgtcctgaaactcactttgtagaccaggctgggcctgaactcagaaatccacctgcctctgcctcccaagtgctgggattaaaggtgtgtgccaccaccacccggggagaatttattttttatgttaaagtttgtttgtttgtttgtttttttaaaaaaactggaaaataacactttttgacccttagaaactcagtttctaatgaaatgcttatattttcagatgaccttttcattttaaaaacgaaattgagaagttttgggttcagtgctttctgccagggttaatccctgggacccatgtagtggaaggagagagtggactcccacagtctgtcctctgacctccattggcaccccatacacatacatatacaccaatgaatacatttggtttctgaccatttcttaccactgttacctgctttctgatgctatgtgtcaccttgttctggttatctactgagagggtgtcagcaggtgcttgtgttttgctagggttgtggtctgctggagaagaccacccaccaggcaaacgtgggactgctttagttgtatgatgtgctgtttatttatgccatttgaagggagttagcataaagaagcagtgggaaagcgatgtctgctgaaggagaagatagtgggcttctgcaggccctcacggaaaccctctgtgaacagcgttcgtttttattaaagtatgccacaatatcagtactccattttagggaaaaggctattttttttgtccttattttctctgctctgaaatgccttcataataacctattatttttgtaatgatagaaatacttgacaaaaaaaagcttaagctgaaggacatagcatattattctgaaatagtttttaaaaattcatcaagtactgctttgttggtctctgattctgtgtgtatcactctttatagcagatacacactgagtacactcttcataacagataccctctctttagaacagacagctcatattgaactaaattagttatagataattggtctgttctgaacttggtatttaactcatttaaactcaatcaccgatgaggcaagtgcccttagcatctagaggaagaaaatgagactgctcattctggtgtgtcttgatgtatgtagaacactaacccagtcactgctgaggtgagcaagtttctgggtaagcagatctgagacactgtagcgcagcttccctgttttcgtactgtgagctgtggaggcacagtgaacagatacagtttatatagtctggattttctgaagtcaacagccaccaaatctgtcaccaagtaacagaaagcccagttgggctaactagctcagcagttcttttagttcagaacagcagacacaactaattcttagttgttttctttaaaattagtgggtgtgctttgtgtttcatcttacctagagcaagccggcgtgtcagttgagaattgatagtggggcattctggcagagagtccgtggcttgacttagaagggcctcagactttcaggatgcctttcactgagcttcacgtgtagccttagtctatggctagcatgtgaggtgaatggatgtggcttctcaggttaggatgggaagctctttgcacagatagtgttagcagttgctcagcagtgtgactgtgcttcctatcattgaaccatacactgcaaaatggttgaaatagtaagtttcttatgtatattttaccataataattgcaaaatatttgaagagtaaacataattatctcagaatcatgtatgtgagtttgctactttttgtgattttatgttggtgttgaatgacatgagctagaagccatactatgaaatttgcaagtctggcataggaaaatttaatatattatatattaatataatattataaaattaatatattatattcaataaatatataaatatgctgtatcagtcatataatattaaatgagatggcatttttaaaaggcttaaggcaagtgtggtagatcacatttataatccccactgaaggtatgaaaaacaagaatttaggttattcctgattacattgttcaaggccagccagagctacccaagaccctgtctcaaaaaacaatggaaaggtgcttaaaacatgatttgttacctagtaaatcaatgttaaatggagaccaaagcattggttctgaattatattgtgatatattaatgaatctataaattgtgcacaaattgaatgtttttcattttttttaaaggttaaagaaataggagattactttaaacaacaccttttgcagtccagacacagaggagcatttgaactggcttatactggttttgtgaaactcactgaaatattgaacaggtaaaataaatgggtgggttttcttttaagagcaggctacagaccatgtgcaggagtaggtgttgtgtgtatctttaatactggagagaaggaagcctacttggccacagggcagctttctcaggttccatgtctgacagcctgcagatggctgactccagtctccgccgatgctgctctcacactcaaggctgatttgatgtgagctaaagactttgccaaacatggctctgaggttactgattcttttcatcagacgaaatgcatgttttgtctgtttgaaaataacttggcatttggaaccaaataaacctggacttctttgggtttatgtgtgtttcacggaataacataaagctttttttgtagacttattttatagaaaaatcttaaaataacaaaaaatagacataattcatcttagaaaaatatttagataaatcgcatgtatttaaccaaatgtgtttttttaagtttatgggtgctgataatatcatttattcatatagtagatttcctctaaatgacttgtaaggaaaccttaagttacttaatgacttaagtatttgtggcaaacattctctaaagaacagtagcattttccaggaaaacatttctgttgcctaaagcgtttgaagtgaagtggccagtcttgtagcttcggcggcccttttactgtacactgctgagaggtctccaccctgatgatttgtatcatgtccccacctccacccctggtaaaacatctctaaaaatgttctgtcatttacagaatttctttagatggcactttaaaaatctttctaatattaaactgttgatatttaaatatgctacttttaaatgtgcatgtgtctgtctgtctgtcagtttgagtgagtgcaggtgcctgtgaaggctagaaggacattgactccccttaatctggagttagaggggattgtgaactaccggatacataggtgctagaaactaaattctggtcccgggaagtagtaaggctcttagatgctaagccatcttctagctctataaactgctgaccttgaaaatatttttatcttttctgagctggatagatggctcagcagttaagagtattagctgcttttccagaggtcctgagttcaattcccagcaaccacatggtggctcacaaccatgtgtgtatgcagacatacacgcagacagagcatttatgtacataaataaggggtaaaggccctttgtgggtgggaccatctctgggctggtagtcttggttctataagagcaggctgagcaaaccaggggaagcaagccagtaacatccctccatggcctctgcatcagctcctgcttgagttccagtcctgacttcctttgatgataaacaacaatgtggaaatataagctgaataaaccctttcattcccaacttgcttcttggtcatgatgtttatgcaggaatagaaaccctgactaagacaggaggaaagggtttattcagcttacatttccatactgctgttcatcaccaaaggaagtcaggattggaactcaagctgatcaggaagcaggagctgatgcagaggccatggagggatgttacttactggcttgcttcccctggcttgctcagcttgctctcttatagaacccaagactaccagcccagggatggcatcatccacaagaggccctcccacttttaccactaattgagaaaatgccccccacagctggatctcatggaggcactttcctaattgaagctcctttctctgtgataattctagcctttgtcaagttgacacacaaaaccagcgattacaatcattccttgatatagttaaagggatgctttttattgttaatgagagagagaaaaaaatatccatagacacttggaagagtccagagcagagagaaagaagcacagtgaacagggccagcagactggagactgctgtctgtgagagaggggaaaccagcaggggacggagatttgagaagagagcagtgagaagagagcagtgagaacagctgagaagagagctggggcgtggcagtgagcctagggtagaaggggagcgaggagggctaggatgctaggatggcctttgaagtgtataataaatccttgtgaatagggactgagggaacctggaggcctgcatcgacctcagtgttcttagaggttcattggagagccccatgccccttttgccaggggtaaaggaaatgactccttttggcgatgagagccagttttacaagttcttgaggaatgctggcttctatctaacagaagtcttcctgtaatccaggttaaactcatttctggatatttggactgccttttggagtttggggaattggagtttcctttggatctaacagatgggaccacaagtagcctcttattcagcatggcaggtttgaagtgactgactgcttctgcacagcagcagtcccccggcagaagctgtatgctctgttctggcccagcagcctggcaaggcttaaagcatcgctccagtcacattctctgggttgtaaagagtcttcaggtcagactggagagagttcatttttttgttttttgtttttcaagacagggtttctctgtgaatagttcattttttgattgcacagtggcaaaaccattgtgtggaaatatatgtggatagaagctattgtagtggccagctttgaaaaatgaatctgtgacgttgaatgcaattgtagaggtcactaggcaatctgtgatggttcctctggttgtaggtgaccagaaaaatggaattgatgttacctaaacagagaaactttggttttgtttgtttgatacagaatagtaagtttgggctgcagaggttaagagtactggatgctcttccagaggtcttgagttcaagtcccagcagccacatggtggctcatgaccatctataatgtaatctggtgcccttttcttgcaggcagacatgcagacagaacactgtatacataataaataaatgaatttaaaagagtagtaagtttatttttccagtcttgagtgtgagacagtgctggactgtcctggcagtggacctcccgttgcagctggagtaggtgtgtgactgaggtgaggcagctgagacaggtctgggaatggctttcatagtcatcactcttggtaggattgaagagtggggatggaaaaaggacagagagccaaggacagaggctttgtgtgagtctgagcatgaaaggaaacacaatgtcttggtgtcagtttcagaactactgtgtccattccaggagaagaaattcggagtagaggaaaggccaagtgcctggtgtattgtccgtttctggtctgtcttaagagatcctgtcatggctgttgctggtggcttagaacctatctgttaggcttctcgtctgatgcctggtgattttgatccttcaggaacatttcaaatgtgactgctttatacagagcatctctatcatgtatagcacttttttggggggagagggggtgttggttggtttttaattttaaaagaaaatctgtttaccatgggcttttttagtggggagggaataataactgcttaaatgatgcaaacttgcttatgcatatagcatttaagaaaacatttgcaagaaagaaatctgggcattggtgagaactcatagaaatcaaggctggttgctggctaccctttgcactacagctgtgttaaggacgaaagcacttaaaaagattaattggcaattaactggagagttaaacatgaactatatcatataaattgagttttaataggattattcaaaatgtcttcaaatgtaaactgactttactattaaacaattatccaagataaacaagaccaggagagatattattctttttctcctgggaatttttttttgaaaataatatttatatatataacacaaacaaatgtggagttaattttctgtaatctgattttctcatttagtgagttctgtttgggacttgatgagatagatagtcagactttctttcaagactccgtaagtgccaagtatggttgtgtgcacatataacttcagtattctggaggctgaggcaggaggctccacatagcaagactctgtcccaagccaaaacaacaacaaaacaagctaaaactatgattatttatgcatagttagctacccaaatgtttgaatgaaatagttaagtacatttaaattaggaataaattcaaatttctggtgaaattcatacatagaactctcctttgtatttgaagatgtttgttttgatttaaagattcccaaactagagtgtggcctttgatttatccaagaatgggggaattctttcgggaattctaagtgtaggagggatttttgtgagtacttaatgatatcttgctcctcatatgagaattgcactgcctgctgaagtgtggttattctacaaataatctctatagtaattatagccatatttactttattgacccctaaatgaactgctgatagctagcaggtttagttataaagtactagtgatgatttgtgatatcaataattatggcagaaataatttaaatatttaatcttttaccacttaactatagctcctatgatgcaaattaaagtgaaagctttttgagcatttttgaatataataaaaactaagttcttctacctttctgcaaaacaaaagaatgcatcttcatagaattggacaaaaataaatgttaagtgtaatatattgggggaagaaatttatttcactttgattaacattgtattgtctaaagctttgataagatacttattgctcacttaactatcctatgaattttatttgaaatgtgaatgattaaattaggaatatgttataagaggctagagatagcaacagtgtatccacatacataaaataaatcttttttaaaaagccatatgaactgggggagtggtgggtattgagacagggtctcactacttagccctggccagcataaaactcacagtggacagtgctggcccaggactcacagaggtgctgtgcctctgctgtacaagtgctgggagtagtaagtgctgctctgccgagtcctttcttctagttctctagtggatttaaaagattttgggaaaactggaatgccttgatgtttatttcctaagtcattttgtgttactgacttgctagtgacctttgaatttttgtttttcacatctattttacctgagtgttttgcctgcgtgtaaattctccaggtgcgtgtagtacccacagaggctaggaaagggcattagatctgctagagcaggaggtacagttgtgagcctccctgtgggtgctaggaaccatacctgcaccctcgcaagagtgacaaatgactgtaacctctgtgagccatgtgtctatccctgtaaagtcagatcatatccctttttctggaaaatgtaacactggttttcaaagtcttcgtaatatgctgtcatttagacagaagaaccttgtttgttctcagtgagtcatctgtagcctggagttttaaaaatcaagtcttcaggatttcctccttgctctctgggaaatgatactaaacactaagagaaccactctttgggccctttctctcagcacttgagtggctgtccttactcttactgtggcttctttactcgtctgttcattgttgcctgtgcctgcagctaaggccagagtcgtctcctgatgctgtaacgcacaggctgtgacccaatgtgggaggtaaaatggcctctgttgataatgtcacctttttaccagcttgcatgtgtgcaaatccctcttctgatttaaagtttctccatacttcagagttatgttcccttttaaacattttttgtaatgcatatgtcttctgtccacatctttcattgtttagtttatttgaaagaaaaaacatgaacctttaaataataaacataatacctgaaaaaagaatgaataaagaattttacttaagaaataattggacattaccaaaagggtttcaggaaattgaatacctcaattaacaacaactaacaagtaatataataaaatccaaactcaacaaggagctagccatggtggatgtaggtggatggagccatggtggatggaagaagcagctgaaaagctgctttatacccagagaatctaatttatgggtacaaaagagtctaatgaccaattagtgggatgtatgatgtatgtaacttgatcttgtgttgtgggggttttcttatcttaaggtacttgtctactaagagtgagatagatggatagatggtggactaatctatttgtggaacaataaattgctttagtgttctgctcatgataacacagaggcctggacaccagccttgtgcatttctactgcttttctaattttaacatgttgaaaattattattattttctgttctgaatattgaatctcaagcattggcattataagaaagagctataccattgaggttaaccccagctctctgtttactatgggctgagaccgtgccacttgaagaggagaacaatcatacaaacctttcttctggcccctgctggattgttatgaagaaagttactgtggcttggtttttttgccaccttggtttgaagtaatagacagaagaaaaaaaaaggtagaaatttaagtgagttccaccactaccttgctaacagcagtacaatatctaacctgtgtgagatatatactcttttcagtaagcggaatttcactcactacatataatgctgccttctgatttgttgtgaaagtctagggggttttaggtgtgaaagagtttaggaaattagacatatttctttttattttttttaattcttgttatttttgtgggtgatgtatttgtgtggttatgtacacgctgtcatgtgtgtgtgccgagcagagggtagcttgtgggagggagctgattaactctctctgttacatgggtcctagggtctcatgtggtaaatgattttacctgatcagccatctccacagccttggaattgggggcatttttgtaagtttcctttagaattggtaaactgattttataggtgttatgtgtaaattaataatatttaactactaaattcatttttgatgagacttgaacacttcttagtaaggaacttgaaattgtatggtattcttgagactaaggacatacggtgtgttttgtatgagtttgacaaaggttgtcaaagcaacagagtcttcagacaaagatgctgtctactctttaattgggaggcatttgctgacagaagcaggacattggaattcccctggtctgtggttggtgatgacatagtgtgggcagaagccatctcttcactcaggatatttcctcttctccttactgacccctggattgtgtgatgaggaaccaaaacaaacaactagaatttgctgcattgttcttgggtgtctttcctggcttcattttacctggcagtttcttccttatcacaacagtaaccctggtgttttgaaatcacatccttataaagcaatctttccttgctggggaatgacagaagatccattgaagagcaagaacttgagggtgttttcattttctagctattgcgacctcatgttgtgaagtcttaaggttgtagcctctccttctacacctgcctttgcagttttgtgcccaccagaagacacaactaatgtgcagcagctgccacctaccctgcttgtttggtttatttgaatttagtcattcaacaaagattttagaacctcttctgaagtatgctagatgttgtgctgaacaagctcttgggatcactgaaaatccgatgtcctaggctggagtgactgggaacctagagaatgtttgtagcctgtgcgtgaaggcttatgtgaggttatggtaagatgttaggggcagttctcaccagggcctttaggaactttgtatgtttagggtgatacctcccctatttgtagcagtcactaaagaagcaaaagaatatctctttgagacaggatttctatgtagctctgactagtggagctgtgtagactaggcgtggccttgaactcagagatcctcgtgcctctgcttcctgagtgctgagatgaaaagagcttgcccaccacaccatgtgtcttgatttttcaaagcatctttgtaatgattttcttttttaaaccctctgttcatagccacacaagtagctgataaaacccgaactaaaatccaaatgaggggagggcgagtatttatctaggctgcagctgaggagacccttgttgatcttactggatgtaaggaattgtgacaggaggctgttaggagaggggaacaataatggtaaagtgtgagccttacttgaatggtacagaagagctttatttgagtgtgtgtatgtgttcatgtggttccacctgcatacaggtgcttgtagaaactacaaggtgtcattcttttgaaaccctcaccttgttcctgacctggtgctcaccaggtaggtaggccatgctgggtggccggccagccccttgcaaggatctccccttctctgctttaccaatgctgtggattccagagcatgtggctcttttatacggctcccagttgggtgccaggccctgttgtaggtacttgagagttaaaaatggatgggagggattatgtcctgggttccttggagcttttattttacaggaaatcatagcacactgtcaactagccctgtgtgtgcacactagcacttgcgagatcaaaagacaattcttggagttctctccttccatctagcgatccgagggtcaggcttgcatacatagctacttcgcctactgagctaccctgcctgcctggttttgttttttgagacagggcctcatatagcccaggcttgagctcactgtttagctgaaggtaccattaaacatgtgatcttttctccccactttccagtgctggggttgcaggggtgacctccaagccccatttagcaatgtttattttggtatgagaaagtttggtggtagagaaaggcctcttttttcatttaaactcaagtagtatttgaaagagcccaaatgattggaagcagcagagttctggggactggtcataagtatgtgggtacctaagagaaaaatggataaaatggaatttaatgagattgtccaaatccataaggctttgtaaggccagataatggatcaaatgcatatggaggtgcatgggttttggtttcctgtgggacgtactcagaatgaatttgatatgcaggcaacccagagaggatacctggcattggcctaaaacgtgactacaactctgtgtctttgcatagtgttttagaggtcaaaaagtttgatattctaaatagccagtctgaggggttagtcttgaagtctgttttccttcacatgttgctttgagtagctgatgatgctgaacttaaaccaacacataccatttattttatatcaaattacactttggcattatataataaattagttaaatgattgtcaaatgtaaatgaagaaagagaagtaaaggggtgtggcaatatgaaaatgtatcagcagccagcctctctatgtaacttcattttttctttttctttcatatttttttgatatttttagttgctttttaaaatttttattagatatcttctttatttacatttcaagtgctatcccaaaagttccctataacctccccctgccctgctcccctacccacccactcccacgtcttggccctggcattcccctgtactgggacatataaagtttgcaataccaaggggcctttcttcccaatgatggccgactaggccatcttctgagacatatgcagctagagacatgagctctagggggtactggttagttcatattgttgttccacctatagggttgcagaccccttcagctccttgggtactttctctagctcctccattgggggccctgtgttccatcctatagatgactgtgagcatccacttctgtgtttgctaggccccagcatagcctcacatgagccagctatatcagggtcccttcagcaaaatcttgacagcataacttaactgaatagattattacttagagctgtttttaaatctgacagttttcaattttacttctgttgatgagcaagggggaaggactttctgtcctaaaagttcttagagatggtagcctggtaagtgaattatttggtaaacaaaagtataggtacaagccttggccttgtgccagtgggcttgtacatggttaatttcgtggcagtgcatgtctgggtgcatttctgggaatttgcttcatacactcactttcacgttcttcacatttcgctgtgagagtggttgctttctgtttgtaggtgaaagtttccttaggtcattgtgaatgattcagttactatcagaaagtggcgtattaacaagaataagtctccccaggttcccaggggacttggagtgcctccagaatggttgagacacagttcccttcatgccgggcacaagtggcttccctgtcagagttctctgtagactgtcccgattgccaggttgctttctgtctgtaccacctagtccattgagcactattttagccttttaattctgatggtacatgttcagagactgaagttactctgaaaataacctgaatataacatgagttggaagataacttctgctttgttatctctaggaagatacttttctcataacagtgcaccccaatgcaccttctggatgagtgtcttttggaagttggtttcagggaacacaaccagctagttcttcttcgtgttttttgtttgtttgtttgtttgtttgtttgggagtgaaaactgaaacaaataacagactaatagctggtagtgtctttataaccagccagattaagccaaaattctagtggaaaatagagtcatcttccttgatgtaatgctttcttaattgagctgaagtcttggttttctgtttttgcttttttacccagttagcaaaagtgcagaagtctgagggaccacagttggctgattgagatgagggaacatggataagccatgtataactaatatgtgtaaatagatggtgaggtgagaccaatttagacttcttggggttaagacagttacttcttgggggaacttggggatgcatagctggggtttgtaaatatatttgagacatgactgagaaataagctggatttgtggagtctttcttttaaggctgggtcttattacttagcccagagtagcctcaatttcaggatccttctgtctcagcctctcaagtgctagaattatactacacctagtttgatctggccatttaaaaggattattaagaatactgtgttgagaataaatgatactggtaaaagtagagtgaccatttgggaagttacagtgtgactttaattcagaaagagatggtggcagtggcttgaaggatgggggagatgaaaaacccgaccagcatctgcatcgtttcaaaataaaatgcctgtggcattgacatatccgataggaagctttctagaagcagtaatgccaagatttttgacctgagttctggaagaaagttattattctttaaacactattttggtttactttgagtaaattgctaaagtacatcttctaggatttctctcattcagagtccctaggagaccatcatcatcatcatcagtagtagtagtaattaattaattaactagctgtgtgtgtgtgtttcccccttgtgagtatgtgaggttcgaggataacttgtgagaggctgttttctctttccaccataggtcccactgagacatctagttcccctggcagatgtttctaatgtgtctcaatccaggttttgcttctacttttgagtgtagtttagtgtggtgtagatattcaacaatggttagttatccttcagcatttttaatatactatgtcccttgttattgagggacatagcatgactgtactctggaagacccaacaagcagctgaaagagtcagaggcagatagttgcacccaaccaatggacagaagctgctggctcctgttgttgaattagggaaagactgaaagaagctgaagagaagggcgatcctgtaggaggaccagcagtctcaattaacctggacaccagacatctctcaaacactggaccaccaaacaggcagcatacaccagctgatatgaggcccccaacacacatacagcagaggattgccggttctgtgttcattcagagatgatgcacctaaccctcaagagactggaggccccagggagtttagaggtcgggaggggtggggagtgggggcatccacgttgagacggaggtgtggtgaggtggggaggaggtatgggatgtggagcagtaggagggtggacagtggggcagggaggaataggtgtggtggtggtggtgaataaaatatggagtgtaaaatacatacatacatacatacatacatacatacatacatacatacatacatacgtaagtaaatttaaaaataaaagagattttttgatacaatttaagttttttagcatcaatgtcatcttttttgaaattatactttgacacagaatatttctagtatttttatatgtgcctgttttattttttcaacactgttttttccaaatttcttgcattttaaaaaatttaagagtttcttgtagcaaagggtggccttactgtgtagccagagctgttgttgaattcatgatcctcctgcttttatcttccaaaatttgggattacaggtatgtgccatacctggcaggcaaatattccttttgtgtttttctcctttgtcataagatattgaacccagggcctggcatgtgctaggcaggcctctctaccattgagctacatccgcagctctcttatgctacttaagaagacatcattccttcagggtttctttagcgtactaaagccaagttatgttatagtctttgccagtctgccctatataattgcttttagagtcaatttatgttccagttattttgtgtgtgtgtgttgtgagagttggttttctgcctataattaggaaccttttgatgactttgttacttatgtggattctgtctctgaggagatagatcagatcttgtcgttttggtccatctcatcccagtcctgctggagtatcacagatggaactaacaagttgctaggcagcctggttcaggttcctggtgcttttggattttcttgtctacagccccagctctgtcctctctcctgggagagggagccactgaaattcccttccctggaggagaactctggtcaccactgctgcttctgaatgtgccttgctgtgaccccttgatgtgtcagcagtctcacctgctgtcaccccctgtggtttccttgctcttcagctgaactagttttagggcttccctctgtgtgttttaggtgttatgaggcaggactgttgtgtcacatgggggatgccttttcacatggaagtcacttactgtatctcatttaaatttctcatagtcagctaatatttttataaagtgcccccaaagaacttcttaaagatgctccaaggtaaattcttgaatgtgatagaagagaaaaacaggaagtagagctctgtaagttgtctttgatcacggagcttttatgtgacacaggagggatgggtcctgtaacttggctccatagttgggattcctaaacacccacgtagatgcttgtccaccctgacttcctagttggtggccttaaccactgtgttcataccttcatctgccaggaatcaatatttgtacatgcatttgtttgttacaagaatgatgcaagatcagttatgtggagcttggtgtgctagatgcataatagacatacaataaatgagttcagtgtagcaggaaaatagattttcagtatgtttaaattatagtgtgtttcatatgaataaagcaagtgagagttatgtcgttaagtgagattttcctatatgactttggggtggggtggggggtctggtccaagagagaagcagagctaggaagcaaggaatctaagaaggagagctcagcgcagagcccagactggacgccagccagtgggagagaggtcttcagaaaagctggctcggtgctgggggttccagagcagggcagggtctggatagaggggcaagaggcaggcctcaggtcttcagtgggcacgggggctcttgtgagcgcactttgccagctgtaaacttgtacaacattcttctgggtctgttttggaaatccccaaattaataaggaacatttggtccttagtatgtaatactcaagggaataaataggcctggctaagtgtttacagttcagatagccaagaatctaaatgagggaattgtctttgggaccttggctaatgtttgttccctggtcatctcctgctttctgcaccctaccctgcagattctccaccattcttccgagcaaccttcaaagtctggcttatatcctgttcctccatgacaccaccaaccctctgtacacctgtgcctagtaattgctctgtataagttagaaaatttatcagttttgataaagaggagtgtgtgtagagactataaacagatgcttagttggaaatatgggcttgtgtgcatatttggtgtgcatgttgtatgctcttgtagaagccagcaaaggcaagaaccttatcaaaaaaaatgtctttgtagaaattgatgaagttaaagtatgaaggttttatgtggctgttcaagaacagttctcagttcataggatgacccaggtttgaagacctgcctggcttctgtggccttcattcgccggcccaggaatgcgtaggcgatgttgtgtggagaagcgtccacatgtgcttgtgccgtggagtagagctgcagtgatttgataggaacacaagctcctgccattgctgtgctctgtgtggtgggttttatcggaagattacacctgccctagactgcagctttgtctttaagccagttctttaatggagcagaaaatgcaaggaaatgaaattcatggaggattctgcatcaagtcattgtaaaagtgactttcttaacttctgtatgtaactccaacacacacacacacacacacacacacacactcacacacacaatactttttcttttaggttttttttcccctaatgtccctgcctactcattgtgagctaaattagcccatatatattcttcctgattttaataatggaagagaaggcggcagctcaagctcttactatgctgttagcactttaggaatcgctttgtgcagtctggaagctggaggttttgggttttggtttttagtttccttagagaaatgaaagactataatgagttagttttattaatgtttatttctgtgtttatgagcgagcatgttcatgtgagtgcagatgccttcagaggtcagaggagggtgctgagtcctctggagctctaggattgtgggtgtggaaactcagttcaggtcctcttacctgagtggtacgtgtgcttaactgctgagccttctcctgggcctctaagttggtaatgttgatgtaagccaaagaaattactagctgtggctaggaatgaagcttactggaagaatagttacctggcaggtgggaggtccaggattcctcctcagtcctgtcaacataggacatttatctttaaaatggtagagaaagaagcaactttatccttacgatgtaaatgtgtgtatgtatgtatatgcgtgtaaaccatgtttaaaagtagagagaataatcgatccagttgtctttatcattgctcagatccgacaggtaacagaccttgccacacgtgctttgtacgtttgcatggtagttgttgaagtattaaaataattagtcttggtctgtgaattttatgcctaggccttcctgtgttgtgtctcttaacacgcagataccttccctcatgttgcactgttccatgcttggtgtgtgttatatctggactacttgcacatttttatgttatttgtcactattgttcttacattgtatttgttcaaatcaaggtctaaacaaggctggcatgttggagtttgttggctttttccctcatgtgcccatgtcaaggtttaaaatcactcattttaagtagtattctatttttaagtcagtgtgaattgtatttttaaatttcagttgctatttggaatagtcagaaatggaagttcactgttcttcaacagaaaaaaaacaaatcccaaatgtgtgtcttaaataaggtgtggctcctgctccaaattacagccagctgtctttttgatgattttttttcctctgcttaaaatcaaagcatttttccaacttgatatctgtttattttactgtgttaatttcagttacgcaggacctggtctttaattccttcttgggaaggctgagtaatggggttgccaagttccaggcttgaatgggcagctcactgagatcttttctcaaactaagaactgcaagggactagggtctggctcagcagtggagcttttgcctgtgcattaaagcccccgtctaatcccttaagtcagggcgcctactgtccatagtggctgcttgcctgtcattgagtatgctgctgcttcagctcatgctaatacagtagcgcaaaagtcttgtgatgggccagtgtgactgatggtcagcagctagcagggcctaagcttagacctgacaactgagcctcagatccccgcggtagcaggagagactactctgcaaggcattcctgcctgtttgtgtatgcacaagcgcttacacacacacacacacacacacacacacacacacacacacacacacacacacacacatttttttttttttttcgagacagggtttctctgtgtagccctggctgtcctggaactcactctgtagaccaggctggccttgaactcagaaattcgcctgcctcagcctcccaagtgctgggattaaaggcgtgcgccaccaacgcccagcacacacacacacacaattttaagagcatcctttgatagtgtccagatgaacttttaacatgtcttgcctcttcctagataaatttcattcttaatattttacagatttgaaaaaaaattatttgtgagaagctacattttaagtgcaatacaaataattattaaaatgtaagcctaaacatacttactttgtgtgtaatatcaataaataaaaaacaaattacagaaaactgtatgtgatgtttttgttggaacccttgagtcttatagtctggactgtctgtaagagtctagtaagccttcttcagagcattgtgagtgtgaaggcaggcctgtgtgatcaagcctattggtagataatgctcgctctgcacacagtagttgtaggaggtaggacctttaatagctcccagcccaagacacacagcaaagagggcgtcttaggagctttcttgctactgtgattgaaatattttataaaaagctgcttaaggagttggggtctgtcgtggttcgtggacagagaggtcgtgacagggaaggccaggcaccaggaactgcaagtggctgcttccaaaggcagacagggaagaacagaggggtgggagtctgtgctgagctcactttctcctctgatagagtgcactcacagctggtgcgtcttctcatcccagaaagggtgcccagaggcgggcgggcgggcggctctcaggtcattcacaataggtgtgtgtgtgatagtatagtaatagggtatagtaggaaactttttagttttagtcttctcaaaataaaatgtttcttctttctaacagtgttactgtatgtcactagtgtacacgtttaccttttagtacctgatgattccaaacatttgctcgcttgtaccttttaggtgctctaatgtgagtctgcaaaagctgccagagcagtggctgcggagcgttctggaggaaattaaaggcagtgatccctcatccaaactttgtgctacaaggcgcagtgctgggattcccttctacatacaggtactcccctaagagcaggcactgctctgtctgggcttggacactgtacttctcttcttactgtgtcagtgaaagtattagatgttcctgtcttttcagtaccatagactttgtgactttgttctttttattttttattacatttagtgatttatatgtgtatacaggcatatacatgctgtggtacacaaagagatcagaggacagctttctggagttggtcgctccttccatcatttagactccagggactgaatttaggttgttaacattggtggcaagcaccattcctagctgtgccatactctgtctcctgcatgactttgttttaatgtgtggacagtatgttctgtgtcaggtctgttcttggagcaggagatcagtcttgtataaacagagagtagcatagatttccatctatgtattcagtagtcaggaatcatggagcaggagatcagtcttgtaatataaacagagggtagtatagatttccatccatgtattcagtagtcaggaattgctgtgggtgtagtgactgcttacttttaggaagtatccatatttgagtccttttattaaatatccatcataaaaaatcataatctttttttgtttatttgtttttggtttggtttgatttggttttttttgggacagagtttctctgtgtagccctgctcatcctggaactcacttcatagaccaactggcctctaactcaaagagattcgcctgcctctgcctcccaagtgctggtaataaagagtgtgccactgtcacacagcctaaaaaaaaaatcacaatattaatagtagctctcgggtagtgtggctatgttgtgcctattacatcatttaatccctacctaaactctatgagctaggtacagctatcatatcctatatgagactagggatatagaggtgacttgccaaaggtcaaagggatgttagaattgctaagcctagtccatctgacccctgaccagatcttcatgcgagactatatgaatacagttcctaaacacagatgaaaacatgctcaacctcttgctttttaaagtaattatacctcacaggatagagagttagagactgttgctttcattatcctgaagaataaaccccagtacactcacagtactaaatcagatgccattcttgttaatagtaagacaaaaatccacaaaacgagtcttttagtccccctgtggttttttctttctctgttttctttcttgtactcccaatatcttcatgactttttgatgcccagttgcagaagtgatcgactgagattactagatagacctgagagatgagccgagctactttggttgagtgtggtttagtttcctatctgcaattcctgcagacctgctgtgttcatgtggccttctttgttgaggacagatgtcaggcaactgaatgtcctgtccagtatttgtgctatgtgcttattcctgctgatagtaatcttgtgctgcccatagttacggagtgatgagcaagtccatttcccaagcccagcaggtagcattgccataccgcttgcccagttctttgggtaaaggtgagtcaagccatgtttccaggaacaaaacctctcagccattgagtgtagctttctgtttttatcttagtggaatgaagttttaattgttagaaaaatctgttcaaaaggatcctacttttcttaacctgacttacaaataaagtaatagcttttgttctgctgacaacttcagtttaaagttagatatggcaaaaaaccctaccatttcagtgtatgagtttcccctttgtgtaaacagacaaaaggatttttaacattcatagagcatattttctgagcataagtttattgtcatgaatttaagtcttttacatggttgtcttgtatttgtcttattgcatagcttgtcattgatttttgaagacccaaagtagttgcaaactttggctctagaagccagaagcaacattttacaagacatacaggtgaaggaagaaagtccaagaatgtgactgaagtggatttcctttgacagctttattgagatataattcacctgtggacagtttatgcatttaatgcatgcaacacagtgattttcagtatatcctcccagctcgagaaccattagcacaatctaattttggaatatctcctgactcctacccattagcagtaacttccaatgtcaccgtacttccctctgctgtccccagccctaggcaaccagctaatctttctgtctgtagagttgtctgttgtggacatctcacgtaaatggaatcttacagtactcagtcttttgtgtctggcttctttcacttagcagtgtattttccgagttccttcatgttgtcacatatgtctatacttcgttcatttttattacattgcctcaagtgctgatagcccattattatgttatgggtatgttatgggatgctagtcacacagtaaacaatacactcctttgaaatccaaatgcatgatcccttggagtttgtaatgtttctttttgtcctgtgtagtttcaaatgctgtggtgtgattagactttcagtagactcttctgtgaataattaaattgttaattagtctcgagagggcctataaacctttagatgaaatctaatccagtatatttttgtcattgtgtaaatagagaaaattttcttatttgaatgccttgcttattgtatctgatgttttacctaattttggtccttacaaagtggccaatcagaaccatttattcaccagctgcttattattacataattgaccaacagacagaaggggctgtggagttgacatgtaacctaattttatacatgaacaggctagaaaagttaagctacctggttaaagtagcctggcttaattaaattcaatagtcttatttttaatagagggtattttaaatttggggattgattccaaagccagcaaataggtgtgtgcaaaataaaagccccttgatttggggatttttttcccccataggcattgttggcatctgaaccaaagaagagtagaatggacttgctgaaaataacaatgagggagctgatctccttggctttgtctgcagatgactcaaagggcagagtccctcaggtaagaatggaggactaaagtctccattaagtctctcctctacctttatttcttttaagtatctgctgaagatacagaactcctgaagacaggttactgtgacgtgtttagagatttggcttatttttgcttttttgttttctcccttttttagtctttcctatctataaaataaacttgccgtggttgatatgtagtgatcaaagtggacaactttaaaattgttgaaaacattcatttgacaagatatttcacagtgtcactatcatacctaaagacctgaaagtgaaaatggagtcacacttgaattgtgtgtgggctttgttgagttaatgtacattttgtagctgaacaattgaatctttctttacagtgtaatgtaggaatgttagtattttatattttaattttaagtaatactttaattcctttatgcgattgggttcaaacacccctcacaaccatcctccagcactagatagaaaataacctgtgcccctttccatccctggtaagcacctttcagtaggatgctcctgctgcactgtgggaggcctgtgctcggtgagggaaaagagaaggaacttgataggattttaagtcttaggtggtgtcaggtaccatgggccatcatgtgggctgactgtggcaaagtctggtgctgattaaagtgtgcataggggccaattactgtaacataattctttgggaaatagaacaaaaagattttgtagtattcaactataaatattaaaatttttgaatattgcttaatatttctaataattatttattttatgtgtatgtatgctttgacttcctacatgtatatgtaccgtgtatgtgcctggttcttatggaagtcagaacaggctgtcaaatcccatggaactagaattagacaagttgttactggagttgtaagtccccttgtgagtactgaacctgggtcttctgcaagaaccgccagtgctgtgggccatctctctaacactctgactagcgttttaaaatgtatttatttcagccaggcagtgatgatgtaccctttcaagactcacactagggaggcaggcagatatgtgtgagttttaggctagcctggtctatagaccaagttctagaacagccagggctatgtagcaaaaccctgtcttggagggaaaaaaaaataaaaagcaaaataaaatgcatttttgttaaagtattaaaacagtatttctacccaattgctctgttatcagggcataatctacaagataggaatagttgatatttattgagattctgtttgtgaatgggtttatgatcattttttaagattaaatgttccatgtgtctttggagagaacctgctattcttatgttttaggtacagaattgtgcatgtgttcagtggatgaagccttttggttgcattgttcattttgtaaactgcttacgtagatgttcagttcttaggtgtattctcctaaatgtacacttttatttgagaactctacatttctggtaatttgtgtacatatttagaattaccgtagttttaaatccaccactaatatttgaacttttcattctaggttcatgctttaaacattctccgagccttgttcagagacacccgtctgggagaaaacattatcccctatgttgctggtggagctaaggctgcaattctgggctttacatcccctgtctgggcagtgagtgttcttgccatgtatccccactgagttcattatgcttttgaatagtaggtttttataagcttgtaactttctcaggggatgattttggatcagaatacattttattcctttatggttccattttctctcctttgttggcttctaattgataatgactttattttgtggcttctatggcatttgtgtctttaacgtaccccacataaaatgtgagcgcttcctaatagtctcatctttgggctgttcctgctacagttttctttgtgatacacagtaaattgatactagactgctacttctttttaatagtccattatcactttttaatttaccacttcagccatctgtaagtatgcacagctcactgcatcaagtacagagaagttggcactattgcctgttttctgaccttctcattacaaatagaagggttcttgagactgtccaccaactcctggtctttccttttttccttcctgtgctcctgcagaggtttctctctgaatctgcctgccctgacacatcaaatacgtgaaacaatataatatatgtccctttgtgtttgatgtgtttctagtatgttgttgcatggatcagaatttctctactttctaaggctgaataatattgtggtatgccaatagaccatttttccttattctgttgataagatgatatcaatagacattgagattgttttcaagttttcaattgtgaatgatgaagcagtaaatgacagttgtcggaatctctgctctcagtttggctgtaacacatgggcattcagcttccttttttggaacgtgtttcctacagcagcagagctggtctctctctctctctctctctctctctctctctctctctctctctctctcttcctctctctctttctttatttgtttcccctccgcaaaccccctatcctaaccccacaccccccgcttctgttagggagctccccccacccactcctgcctcatcaccccagcattcccctgtatttttaaattgttaataggatttgaatcagattgagaaaaggacgatactcagctttagatttttatgttcttgttggatgtttttgactcacataaattgttctcttcaggaaaaatcgttgtcaatgaactcctaagacacaatcaatctctagctgtgtctgtaaggaagaaatgccagcataacggtttgctgcttcttcacagagcctcagtttcgattttctcatgtcatagataatgctaagctttgattattctcatgtagagttatactagataatattttctaccataggggattcatctcaaaaatatccaaacaatcttgtgtaggcatatatatctaatatgttgtaagaactaactaaaatgagctaattttgtgtgtgaggtggtgaaacttcattgaaagcctgttctaataagtgtgaaatagtattccattctggtttttaaaaaactcttcagactgattgtgtgtgtgaatgttttgtgtttgcacatgaatatgggtacccataacatgcctggtgcctgtggaggtcaaagagggcattggatctcctagaagtggagatacagatgttcgtgagccaccatgtgggagctgggaaccatacttagctctctgtcaggagcaacaaagctcttaactacctagtccctcccattctgggtttgatttgcatttccaaagtgattagtaataatgatctggaaacagaacaactcttaatatcttttttttctttttctttttttttttccattttttattaggtatttagctcatttacatttaaaaatatggaacgcttcacgaatttgcgtgtcatccttgcgcaggggccatgctaatcttctctgtatcgttccaattttagtatatgtgctgccgaagcgagcactcttaatatcttaataggtctttcagagtctgtggattcctttacccacagtgtgtcgttccgtcagcagtagagtcttcccttccagtcctggtagacaacaagaacaatgcactaacctttgttgttgggggcttttctggcctttctgcctggcactgagattttaataacccaggtgccccataggttcatgtgtttgagtacttgagtttctacatagtgtcgctgtatgggaaggttgtgaaactttacttggtagagcctttaaaactggtcactgggagcaggtcttgaagctttatagccttgtcccacttcctgtttattctgtgcttcctgcctatgtatacaatgtgaccagccagtttcctactcctgtcacctgacttctgtaccatgacagaactgtaacccagaataaactcttccttcctgtatgactagtataacacctgtttaataccatgttcaaataaccaaagtatggcaggtttatatcaataattccagtccttgagaaactggagcaagaggatagcttgggtcacataacaagatcatgtcttattaaaaaacaaaatgaaacaaaaaaaaataacagctggggttatgggtcaataataaaatacttgcctagcatgtgcaagaccctgggttttaaataaagattatttaaaactcagtaagaaaaagacaacccaattaaaaggtacatgcattttcccagaaaaggtgttaatcagtgggcacaggggaaagtgtttcctagcgttttgttactagggaaatgcaaatcaaagccatccacagaatgtaaaaacagcaacaacagcacactaacaaatattcatgtactgtaggtctgacctgaggcaggggcatcctggtaatggaattgcaggtgacagatgatggtgtgctgcttgggacactgactgctcttattatgacaagagctctgtgatttgcctaccattgagtggaaatctctgtccagtttagggactacactgtgaatggtataaagtccattttcatggtgattgtggatgaattggcaattcacacttctagagcagaggtggcagtgggtggccattaggacagatgtggtctactgctgtgttttatttggcttacaagatggtgcctccctttcctttaatttgttgccagcatttccaaatagtgagatttcacataaaaattgaggtttctggcttcccttgaaaaacacagaagatctggcaacactggtcttctattccctggaggccactagtcagcctgagctggatattaactggcctagacacagtgctctgccatttctattgccagcactctggacagctgagtcggtggctctcagtgcaatggcttcggaagcccctttctaattctactgcttttactgttaccttcttcaaaaatatgcgttgcactttcctgtgcttgagtacataattatacagctcatgtgtagcagtcagtcacattataattgttaagagcttattaaaaagcagaagaaaacaaagtaacagctggggttatgggtcagtgatggatcacttgccttgcatgggcaagaccccgcgctttacataaaggctatttaaaactcagtaagaaaaagacaccccaattaaaagtacatgcatttctccaaagatgatattaaagtgacaaaggacacatgggaaagtgtttcctagcattccttccacaatagaggtcccaggcacggagcttatgtcatccgacttagcatcaagtgcctttatctgttgagccattttgctggctcacattcttagttttgataatctctctgcttatattactagttgacatacattattatgatgatgcctacttttaatataggttctgttatagaagtttaaaatttctgattctgagtgttcttcatgattctggtataactcagtactcgctcatttgataagataattgaggaaggctaatattaggatagtgaagatttttttgtgattccgaaggatcttgacacaatggcttagtgaagataggctctgttagtatgttggagtaataattatgctttattcataataatttttcctttattaaaagatttatttgcttattttacctgtgtgaatgttttgcctgcatgtatatgtgtgcaccacatgtctgcctggttttaaggaggttaaaacagcattagatctaaaattggagttgtaattggttgtgaggaaccaaatgggtgctgggtcctcttcaaaaacacccagtcctacacctgctgagccatctctccacatgatcttgcccccttttcttttgaaagacattatataccctcatgatattacccaagacattatataccctcatgatattacccaagatattatataccctcatgatattacccaagacattatacaccctcatgatattacccaaggcattatataccctcatgatattacccaagacattatacaccctcatgatattacccaagacattatacaccctcatgatattacccaagacattatacaccctcatgatattacccaagatattatataccctcatgatattacccaagacattatataccctcatgatattacccaagacattatataccctcatgatattacccaagacattatacgccctcatgatattacccaagacattatataccctcatgatattacccaagacattatataccctcatgatattacccaagacgttatataccctcatgatattacccaagacatcatataccctcatgatattacccaagacatcatataccctcatgatattacccaagacattatataccctcatgatattacccaagacattatacaccctcatgatattacccaagacattatacaccctcatgatattacccaagacattatacaccctcatgatattacccaagacattatataccctcatgatattacccaagacattatacaccctcatgatattacccaagacattatacaccctcatgatattacccaagacattatacaccctcatgatattacccaagacattatatgccctcatgatattacccaagcaggcctgcctgtagctcacgattctcctgctccgacctcccaaatcctggtcttacagccttgtgctactgtgactggttgttttactttttattaatcaattatcataaaataatttcagaggctgtgtggtgttactgcacacccttaatcccagcagaggaaggtgaactcttgaactcttgtgagttcaaggccagcctggtcttcagagggagttccatgacagacaggaggactatgtatgcagagaaaccctatcttgggtgggaaaaataataataaattaaaaacaaagaaagaaaagaaatcttctgagttaaataacttgagggggctattggcattgtaagattaataataccatcctgaatactaaccgccttggctgctttaattcatggattctatcaagttaaacctcacgagtgtccttcacagatgaaaggaggagctcgggtctccctggtgtgctcattgtcaggtgacgtgggaaactaaagtccgctttggttttagaagtatggtattagaaagactctgctgtgtgcagtggttggacttgcacagctggtacagctgaaaaggaagccattgaatgaattatcagaattttttttctcagttgccttttttatgaacacaatccttattttctttagccccacctaattagttaatgattttgaatatctagtttaaacattataaatgggtttcgtgccgtaactactttctaactctcactttctgtttattttacattaggtgagaaattcatccacacttctctttagttccttgatcacaagagtttttggcgttaagagaggaaaggatgaagtttccaaaacaaataggtaagcccagtgcaacctcaccttcacacagaagctcgggctaatgtagctgctgattcagagtcctcagtgagccaagactgtgcaggtgctccagtgggctcagccatacccaagtctgcgtccttgggcggatcagctgtgtaataagcaggtcttgggaggcagcaggagcagggctgcagggcagggctgcagggcaggagtgcagtttgactacctctgggtacataagcaaggcttctgtctgtacttgttatcttcttcaagtattgatgaaatgcccccaattactctttctagttgcacttaaaaaactcttcagcaggtcatcctgtcatgtccaggtagagacgtagccatctctgtctgtgttcagtgtatgtccctgactcctttttccttgtacgttgtatgtggacacgtggaagaatcactacgtctggctttttggagtttatgctctcagatacttttctcgacgtgatatctttagtgaacctgtgcacacattttgattatagacaatttaaatgcacggtgaagttgtatgcgtttctaaagaagagaagcaattaactagggaattgtttccactgcagaggagttgatgcttgtctaacactaggtgtcactgttgttttgtgttcagttgctcccttaccattacttaggatccagtttggttggctaagtggtctttagttttccctctcacctaaaaaggttgccatgctccaaatttaagttttaggctgattacttaaagagtgaatttttttttctttttggtttttgttttctagacagggtctctctgtgtagccttgcctgttctagacttctctctgtagaccaggcccaccttgagttcataaagacacacctgcctctgcttcctgagtgctgggattaaaggcgtgctccattattgcccagctctcagcacaccatttggatgctttgcacaccactcctaagatgacctgcgcctccagcacccacagtgtttctctgctgctgctgcttcttgttgttgttgttttttttttttttatagatttatttacttatttcatgtatgtgagtacactgtagctgtcttcagacacactagaagagggcattgaatgcccattacagatgattgtgagccaccatgtggttgctgggaattgacctcaggacctctggaagagcagtcagtgctcttaactgctgagccatctctccagccagaatatattttcttgtgatagaactaagtcttaggaattaaaaagtatgctagacactgtgacactgaggcacaccactgtaacaccagtgctagagtggctgagataggaggattgtgcatctgaggctagccttgacgacagactgaaaccatgtctcccagaaaaaaaaagttatgagatatatgctgtcagtgaaacttcgtgtcactctgaattgtaatttgaaaatctatttaccactctgtaaaactcaccatatatataaaagggaggtaactagatataattatgaatcacctaagaatttgatgaaaatactagactattttttaatcattattatttttctgtgtatctatgtgagcatatgtacacatgtatgcagtacccacagagaccagaagagggcatcaggtctgtgaaccacctgatgtgagtgctggcatctgaacccagattctcacaattgagctgcaactgtttttaatggctgaggcatttctctagttcttagtctgttctgaaatccaaattgtagttcaaaagcaaaacattgcttgtttggaaggatgatgataatttttgtttttcttaaagtagtttgtccattgagtagtttaaaatgactagtgctgcttctctttaggtctgtgcacctgggtcataattctgcagtgtgctaaggttcaatctgcttataaaaccgtgattactggtgatacaaaccaagcctgaggagacaaccctatagcctcagtcctcaggatgcaggtgcaggagcatctggagctgaaagtcagcctgggctacatagctagtttgaggccagcctgtgctactcggaactttgtcttggaaaagcaaatataattggtttcttcttatagttgtgaagtgcatacagattttactatgagaagtactagagaaaatgatgagatgtttaatttaggttgaaaggggggaagaatatggcagtcataaacatggttttaccaacgttacactgatggagatcccttctgtacatgattctctttgagttggaaagggtaggaaatgagaactttcctggagagaaagaagcagcgtagttcagaatggttctagtgcagtggaagggaagtgaggaaaaggaggaaatggattctttattcagtgtgatggtcgcttttggtcagagcccttgtgtttgtcatctgaagatttgtcagggccacccttacacaggcttctgctttctcccaactggaaagcctgtctcagctgtcattggatctgcactctaacgccttcatggcctccagtttgcagcagtcggtctgcaaacgagatgtacttggttgcttcgctttctgctgcagtgcacatctgctcgttcatactgaggcctttccgtctattatttggtgtatgctggaaatgatggcttgacttttgtttttttgcaatcgggtaactaaactcacctggtgacatctcacaggatggtgatgtttgctttcacaaggtctctgctctgccagagaactacaaatgtgtgctactggtcaggaaggagttgacaggaaaagaacacctgcctttttcaccagctgtgaaaatcctgtctcttggagtaaacagcttggtttctaggctttctgctgccactggcagtgaccttcatagactcctttagctgctccccactaccatcccaggatactgagatctaggcttctgtcagagctaagcactagactgccttttcctctgacagcgttggagtcctgcacggacacagacgcatttgctattgcttctgtcctgcttctgccacccttgccccgcacccgtgctgccaggtttttgagaaaagtttggtgtcagtgtcttgacattctttgtatacttggtgcctctaaaactctcttggatgtaggagactaacagacagacttgcttaataagcacattcttggtgctaaacaaagaagaagaagctggtttctcctgcttttatccccaggtggctgcagtaattgactgaaacaagttctagctgatctctctgtgcctggagttcccctgtaaaatgagggttcttggagtatccctgctgtccttctttaaatgctaagcccaggctttccataaagttcttagaattgcagattcggttaagtgcagttcctagtgcatagacctgcacatagtagggtaaaacaaacaagcaaacaaaacctactttcataaataaagaagtgatcaagagtccatcttcctttgtaagtgtactaaaataaaggtgctttttgagctcattggccttgttttatatgtgttctttggtacgttttatttgtctgcatgttttaaactgtgcatctattgaaggatatcttgtattgtttgtggttttgaactgttaacagataaagctgtgacggccattcatatatttgtatgaccacagagttttacttccctggattgagtggcgagttttatttatattttgtgcataggtgttttgcctgcgtgtgttgtgtgtctgtgcaacatgtccatgtagtacccactgaggccagaagaaaaagtcaggccctcctgaattgaacttacagacggttgttagctgccatgatggttctggtaatggaatccggttcctctggaagatcagtcgatcactcttgtttaatcactgagccatctctccagccccttatttgttgtgttcttgagtagtattttatttagattttctaaaacctatttccttgtgtttcttgtcatttaacagacttagaactcagcctgactcagagctctgaccatgctttctcaaacagctccatctgcacagggagggtgggggtcctgcatgactctccctttcttacagcagatccctgatttaaaccctatgtgaattaaccttcaagttgtcttattcaagctctataaccaatgtcaatggataatagtctgaaaagctttatttttgaccatatgacatccatatggacagtgtagaggaagagagtgaattagggtagcgtttgcacagtcctaatgcagtgtggcgctcatggcaagcacctactgtgaactgttaccagttaactgtgttaactgggagaggagcacatgagggtctgaagcctggtctagaagcgaggagcttacagttcagctgaagacacaaagattgagactgtgaaccaggtgaaatggaaaatatataccataattatctgcataacatgatacaagtactgaattctgtagatatttgtaaatggaaaactaagtggaatatttgaagggaaattttctttaaaaggcacagtggatgagtagatctgggtacatgcgagaaatccaatctaaaaaggaaaataaaatttgatttactgctatgcaccttctttattttgtcttcttaaagagaaacgcgtagaaagattttgtacagtgtaagaaggaaatgtgtctgtaaaaacattattagacccaactacatggatctcagtgactgtggaaagacactgcatgactttactttctggtgtggaaaggacagaaccattttagttacttctttttctatcttgatggcacagatgtgccagcatcttctaaggagtgtcttacgctgccccgcactctgcttcctggaagattgtgaagcagttgccagacagaactacttttctcttgtttttcatgttttctaggaaaacagattccacaagtttctgtggttacctactccattgttgaaggaagaactggattctcaaaactcaaattgagagctgtggagtatgtgggtttttgtgcttttgaaaatgtaattattagaattcacaataggttgtttgatttgaactgtttagtagcttgcagcaagtacttatttggccaaactgaaaccagaattttcccaaaagaattctcattttcttcactaaatgtgcatttgttgtgtccttactctggaccaggtactagaatacagacagggatcagaagtattccatgctgtgctaaagatggagctcaattgaaggtctgcgtggcgtccgcagagccctgggttcaggctctagtaccactgaaaccccaggtggtgatgagtgcataaagtcccagcacttgagaggcgaagactggaaggctggaaactcaagttcattcttaagaattagaagctagggctgtagagttggctcagtgtcaagagtatttgttgttgcaaggacccaggttcgagtctcagcacccacatggaggcttaccacctcaaagaccagcaactgtggtgcacagacacacatgaaggcaaaactctaatacacataaaataataaaaatctaaaatatttttaaaacatttgtttacttattttatgaatatgagtacaccaccattgttctcttcagacacaccagaaggggacatcagaccccattacagatggttgcgagccaccatgtggttgctgggaattgaactcaggacctctggaagagcaattggtgcttttaaccactgagccatttcccccagccctaatttttttttttttaagttagaagctagccttggttacaacattttgtctaaaataatttgagaagatggaggagaaaagggaagttgtcatagccagtaaaggcatgagtcgcataagcctgaatatgtaaattcagtttcttgaacccacaatgaaagcagaaggaaagagtgattacagagttgatcctgcccctccccatcatgcgcacgcgcacacgtgtacacacacacacattccatgtccttggggaaactgaagggttgatgaagattatctgctgtgttcgagtctctgttgaagggcaggagaggttcccttgatgcctacccgtttcccatcctgtgttgtacgggcccggccttcccaggccccctttacttcatgcctatggaggtaatggaagaacgggcttcagtatcaaggattccagtatcatgctgcagaaccaggaaggtagaagtcttggattcagtttgacttaccccaccaaggtgccagtgctgctgttagacatttgccgtttttacagttaactctataaaacttttatgtttgataatagctgggtgctatgggatgagaatttgggggcttataaaacttctttcctgtaatgtgatttcttttagacttaactaaatattttttatagtccatgcttgtgtttttcattcatgtctttaattaaagccagtcttgattgtaacagccatcattacttggttttatcctaagaccctaagacataatagtgcttttcacactttgtagatgtgaaaattgagttacaggaaagatttgctcaagatcatgagtagcactagcagtaaaagtcaatgattatttttagctcacattagtttgactagaacattttttaaattgcaggtttttctagtagtaacaataatacaaaactgtattcagtgattcttttgtagaatatgaattttattcttccaagaagatacttcacttatcataggcttttaaacggtgattaaaaatcaagagtcccatgttttgatgtggtttagaggcatcatccattcattgtccacagacgtttatagagcattaagtttctgttttttagccagagaagaaaagtgactgcctgtaaagactgagaactaaggctcatggcccgtgttgctgttgttgagtcgctcttacaactagagtgaagtctatgctgaccctttgagccagggtagagatccatatcttaagttactgttcaattctcaggttcaagaattgtaggaagaaaaccacaaataaaatttttaacttaaaaaaaaattcttgaaaagtaatacattcatgaaattgaagagggatgtagtcattgtgttcttaaatattgactcttgcacggaccacgtaatcttcgttcttaagtactgcttcaggccattgcctgctttaataactcaggcattgttgttttcgttagagcatgttctatggaattttggcaatgcatgcatcctctttctgtatcttagaaaagcacgagtaaatattttttctttgctttggtgtttttgtagcttaaattttatatgagccagactaatataatgtaataccaagattacataatttaagacgtcagggttgcttccaggccatgagatgaatcttcatttatcgggagggttacaggcagtacttgttgcacattcactacctgtagagacagacagaccacagaactgttttcgcaatgagaaggcagagtcagaaaggttaaacactgaggagcagcatcgttagagcgtggggagtattcccttctcgttccaacttagtcctcaaaaccattcctgttagtgctgaggaatttgagtgctgttgcagactaaatttttagactatggttaatagagtttgtattgactacttactctgtacctgggcactatagctcatgccatggtcttatacttccaggactgtattgtttagtgaaagagaagataattttgaacttgttcaataaatgtgattactagacgttatagtcctgactgtcagagacgttaaaagtcctttacaaattaaagtgcttcctagagaggaaaaagcttcatattttgtattagaattttcaaccattttattatgaagagatcattccttttttccaaactcttgattcttggttatgttctcatagcatggttggggaactaatcaggatgccaagggcctgatcaagtcatgagttggtgtgtgtttatgtgagaaagttagcagctgggcccaggaacagtggtgaatagatagataggctttgggcccttttttgaggcatataactgctctgagagggatggcttcccaaccaaagttaagttccacttataggagtgatgaaggttgggggatggatgtttattaagcaattaatgatgtcaattgctacgttcgtctagggtccagaatctagaccatctccagagatctgaagatgtctttataaagaatagagatgtcaggcatagtggtgcatgcctttatcccagcacttgggaggcagagacgggggaatctctgtgagtttgaggtcaacctgctcaacatagtgagttccagaatagctagagctgtatagtaagaccctgtcttgaaaaaaaaaaaaaaacgaacaaaaatagtgaatttaatattgaaagataacatatgcagtattttgttttagcctataagaaagtttatttttcttgtatattttttttacatataattataaaatgttgaactgaggctgttttctatgactttatacacatcatttttgtaatcttgcatttaaatgcagtgtcatctagtcttagtacattttgtgtttctgaatcagactgtctgagattaggtaatatataaagcttggcctatgattctggtggctgcaagtggtcaaaatcatgaacttggcattcctgagatatccccatgtctctatttacagcagggcagagacacaaaaataaccacatatatcagggccaagtgtatgggcagccttgttgtagtataacctactctgttgccatgtgatccatccttcaagatagcgtagtccactcaagagtgtgtaattttcctgtgatcagattaccttcttttactggttccatcacgtctgagctgttatgccgagggccagacttccagtatatgtacctttgagggaactacatttgtagttaacttccagaaagaaagtacatcttttcagataaatggtgtggtgaacattaaaattgagattctgactatgatatagttattctctgagactgaaatgtctcccagtatcatagctatggtggtttgaagactttgataggctcatatatttgaatgcttgatcctcggttggtacagctgttggagaaggatatggctgtggcgttgttggaggagttatgttactggagatgggcattgcccacgtcattttcagttagctcgttctctctgcctcatgcttatgggtcagtgtgtaagctctcagctactgctccagagcagtgcgttcctgacttctgccatggtccccacagtgactatcatggattcaccctttgtaactctccaataaagtgcttccttgataagttcccttggtcatggtaccttagcatagcactaggaaagaaaggaagacaatagctgatctgttatcagctaattgcaaactgtgatttactttggaatttgacccatatgttacaatgttgatttccttgttggaaggtaaaactgtgtgaagtcaaataatacaagtttattggacttggtattttagatttatttttatttctgggtcccaaatccccattcattttaaattgaatgtggtattttaatctgacatttttggcctctctgctcaattcgtcttgttgtcttacataatctctctttttctggcagtcaagtttttcttttccatcctctaattgttgagttgtatattctatacaaactgcttctatagaaggagcacgaagctgtctggctcagggcaaaccagttgggctgaccaggagaagagtagactagctgcattgcatagggcctgatctatctgctgagtcttggaggcagggctaaaatttcccctctgtgagcacagaactcagctctgtgccatcttcatgtttgctgatttatttctgtgactactgaggtgtctgagtcttcagatgcatagaggtgtcatttctaccccttcattcagttgagtcctttcaacatcccccgtcacagtccagacgctcctgtgcttgtaccatgtctacagaattggtgtccattcattcaagcctgtgggcactgacagggctcagacacttagagaatagaatcagaatttgaggacaagtagagcgatgctgtgacccaccaaggactgcttcctccagctaactctgcacaggcaggaaggtggggaagcacctggcttctgtctccctcccctcataggatcaggctgatgctgctccttcagtctccgctttattcctctgaacaaatgcacctccagcagaactccgtcccagtctttaagcttgcatgcttcaaactctttcctttctccatgttttcttcctgtgtgtactgttcttctttatcgagttccttaccctgccagaataaggaggaagtacagagcagcgttgacactatcttccagatttatatttgcaaatgaagtgataacttcaagaaacattgtcaccgatctttatagataagacatgtcctgtttttactaaaacaaaaataaactaacaaaaaccaaaataaaaatttagtgtaggccagcatctttatcttctttatgatttaattaagctttctctaaagtgttaacactctagagaaataaaagaagttttttgaatggtactttctcattttggttatttaccagtaagttgatgtcttaatgtcttttcctgttgctgtgattaaacgctctgacacaacttaaggcagaaaggatttatttcagttcacagttcagggtatagttcaccatggcgggaacatggggcagcaggagcctgaaacagagacgatgaagctatggtgctgctgctctgtcacctttctccatttacacagctcaggtgacgcccagttaagatgggtcttcctgtgtcacatggtcaagacagtccctcagcaggcatactcagaggcttgccaagctcctcagtgattctaggccttgtcaagctgggcatttaacacttaacttttatcattataaaaatataatggtttgccgggcgtggcccacgcctttaatccaaacacttgggaggcagaggcaggcggatttctgagttggaggacagcctggtctacaaagtgagttccaggacagccagggctatacagagaaaccctgtctcgaaaaaccaaaagaaaaaaaaaatatatatatatatatatatatacacacacacacacacacacacacacacacacacacacacatacataatggttcagcagtgaaatacctcatttctgtggggtgcctgctaatgaaagtctcgctgaaattgtttctcacttgttatgtagccttgccacagatggactgatcatttttaaatacttgggttttttccttcctgtttttatccctggctgccttcaaaactgctctgatataactaccaagctggttggcttgtccaagaaaattgaattctgtggattccattgtattttctgtggggtttctttgaaaactccctcttgctcccattctcattaaattgaaatttaatgattttaaagtcccagtaagtttgtcttcatctggagtagctgtgcatctagtctggtcctgttgctgagcacgtgtgaggaagcatctgctgtagtagtctaaggagtacaccagaacatacaataacatacaatgtgcttgctgtgaaacagactcaaattagattgtaggcaaagtaattaaggaagagctaagctagtgttacattatgaaatgacaatagttttaagaatgaggaaatgtttgctaattagaaatgaagttctgttctgttctagaataaccggaggcaagcttctaatgattcttacatattcttcctgtgatgttcgtgcagatacacatgcatgtatatttggtgctcagccaactcaagggattttgctgccttttagagggataatgtgagttttgatatatatccctctaaggggaggtgtgaggagtgtagtggctgtggatcaaatccagggtgtggtgtctataaggcaagcactccacaactgaacttcctccctgggcctttggatgcgttctttataatcagagacaatctataattgtcagtgtctttattgtttcttggggaataatgagtgatgctaacagtgttctttgttccctgcaaatctggaggggttggctctctttttctttctattgtgaattctgaggctaggactcataatgccaggtgtgtatggcaaagctgttaattcgggccagcttggcagcttttaaagcatctcatgagcatcatcaccttacctcttcataagtgactcatgaagaaaggtctttagaatgaacaagccatagttttcttgataataattctgtcactaattttttgtcgtagcttgtgtgctttttgttgagaactgggctcctgtagccaggactggctttaaacttgcagtgttgtccagaatgaccatgacctcttctcactcctgacatccccttctgagtaccaggactgcaggtttgcgctaccacgccttgcaaataatcccattactaagtatttcttccctccaactttaaagatattcagaagtgttttaatacatgtagtacttttctttatttagctcatgtcacctgtgtgtaattcctaggaccctgcatactacttgtctttgggatctgtttgtggttgtcaaatcttaaaagacagttttcctcgtggccttcctattgtagttgtctccctttcgctagccctctgaggtttctgtctctctgatcactccctgctctgctgctgccgatcactcattgtgcatttgcagcctatctaatttttccacataataaaaaatagggtaaagattattcctgtgaacttttaattttttcccattttggggggaggggattgtttctttggaataaatgttcagaaatgggaatactgggttaaagaatacaaatatttttaaacctgatagtcaagcttcttttaaatgagattgtatcaatttacaaatttaccagcacgtataatcttctcagtagtggctataattactttttggtaaggcatgtgtaagggaatgtgggaggaaaagggccatgctgtttcaatttcctttgctttttattagtgggagattgaacatttgccacatttatttgttggttaattgtattttcttcagcattgctttcgggaccctctataatttgcacctgaccttttcaccttattttctattattcaaactcacaaatatttattaaactcttgggctgccgtctcccacccaacaaatacatagactctaatcagaccaatctgtcatgttcctctgattatgttatgcttttcctttgagagcccccctccccccagcttttgttggggtttgggtttggtttgggttttttctacccgtaaaatgcccatcccttcttttttccttaagctatgcttcctcgccatcagattcagcttcaactttttactctctgggaagtcttccctgatgtgactgtggcagacctggctcaggtcccactctccttgttccccgtcacttggtctgcatctgcctttgtagcaggtccaggagagcatgttgattgagatggacagggcaacagacaaatctagatctcacttcatttgcttgtggtttagtgccctgctctctggttccttcacctcagtgttctcaggacctgggataatcacgtctggctctatggtgcttgaggggtgaagtggaggtgcttgtggaggggggccctgttggggtgcgtggtgtacagaactctcctttcagtgcttaggcgtggttttggttgaggttgtttttctctttaagacctgcactggttgaggtcagttggaattgcagcactgacagctgggaagaagacatggggtcccactcttaaccaagaaactgtatttcatacatactggcaaagggaaagtcagttttctccaatggagtgtcaccaggtctgtcaaccactctccggggcaggtgccatgctcaggagtaattagacaatacaaaaggaatgccatgcattgtttgctatttatttgtgtgtgtgggggggaactttttgttttgttttgtcttactgcttttgttttattttgttttgtaggccaagtgagaatgcttgtttatgttttaaattaattgcatgattccacccactgactcagggtttgtgttcttttgcttcaggattcttcctttttgttgttgttgacattttgagataggatagcttggtcggccaggaactggctgaggcccaggatgactcctcatctccttctagcacctctggagtccatagcttgtacgcctgtgtgccaatgtcctcgcttatgcagtactagggattgacccacagcctcccaaatacctggccagcgctctcctgacggagccgtagccgcgggatgacctgtcctcgtataccttagacatggtgtattgtctcctatgagttaatctgtattctcaaagaaatagcaaagagaggactgcattgtgggtgtagtgagttcccagcacactgtgtagtcgctgattcagtagtgctgggtggtctgaggagctgggaaaggagggcactcagagccaagggcttgactgtagtttaccagcagagctttctcccagggccaaaaaaacagctaatcctcacaaggcgttcaggacaccattcactgaaactaatgatactgatgggacccacgaatcagataggaacaaggaatccagtgaccaaacatgagtggcattaacatgagtgaattgagaacaacatttcctatgtagtgcaaagcttaaaggaatacgaggggaagtggttgctttttgattattttgaagtaaaagttacaggagagaaagactttctgaattctctttccccttctacatctcctacatctgcttcctacttgctattttataaaaaaattatagtgagtatattttccttgtaattattaagcagacctgaatagacattggtaaagtagattacatctaagaatctttagcttacctattgaagctattggatattattggcttctctaggcttttatataaatagtgagattttaaatagtgaaaaccatgttaatttttaggatcattttccttagtagagactagtgatggataagctgggaacaaacttgtgtagattctaaataatccaaaaaggaagcttgaaatagttaacacttttggatctatatgatcattgtgtttgttttttaaaacaaagtgcttgcatttgtattctccattaaaaataaacattgagttagatgcttgttcagccaagtggagtcagttatccagtagaaatcctaaaaagattcaaattataccaccagattttactttcccataaagtgttgtattcactaatctatgtgaggaacctatacttaataacaccataagaagctgtaaatgaaagcagaaagctgactcctgctccgtttaactggcagctcctgtggtttggattcgcagcactgttacgccctcattcacaccctggatttccaagcgttttcaaaaagctgaaatggtgactcaagtttgtcaacatgtgacaggttattttcctttatttaaaatgtaagcaacagaaattattctggatgaagctctccacttattttagcagcagcagatgctctctgtgatcagtacgtctactaaagaccagcgctttgtgcctagaccgcaagcctcacaacttagctttatgcctttccaggcgtaccagtgagcgaataagccaacatatcagtctagtctggcttagctcagcactctttgattttttccagtctgtttgatgtagaggcttactgagatttatctactgagctgttcatagtctgtagggtcagagccctggctgcattatataagattccaccagtgacagaggacatgggaagtctctgtagtgtggatactttagttccttgtgttgctccttgttttgcttttgaaaaatttgaaactattctcaaacttttattaatattcagtattttttcattttctaattttatactgaaagccttaaaacagatgtgctataattggttcagtttactaaagattgtttcaacatttggtagaaacagctatgcaaatgtgaaaacttttccaattatttgaaagagaaaatcaaaataaaagtatgcagtgaccagttgcaggtactggctgtatgcagaggcgaatgtcctcttattctgctatttctggttgcaataacagtaatgtacccagcgttataaaaagcctgcagactgtcttctccttatctcatgtgttcccaggcattcccagtaggataagtattattgccccattccagatggcagtcttgggagtttctgtgattaatttgctacatgtttcatatctgctgtgatgcagagctggtgttaactcctaacctagttatttttccattatatcagagcttttttgttgactaatacacaccatttctaaaagcaacagagttttgctagtggtttgatcgtgtcctctttcctgagaggtggaataaaattgctcaggctcctggagataagagcattatgtcatactggaggactgatgacgtacattcatccctgcttcactaccctcacatagcaaacaggacagacagacgtctgaggcttgtgggattgtgttagtattgtccacacaaccctgaaagagtgcctggcatagaggagatgcagagggcattttgctgttgctagaaacatttattcagtggacttgctttgcttgctgtgtgcagagtaatgtgctgagcatttaagtctttagctttaagaatctccgagctaagggctggagagatggttgatgaaagcacttgctcttcttacggagcctgggcttggtccccataaacaccttgatggctcactccaggtctaggcaatccaacgccctgttcaggccgttgcaggcaccaaacatggatgtgttacacatacatacttcaggcacagtcacatatgcaaaaataaaaagactctcagagtcaactagagtaggtgcactccacattgcaggccccgacctcagagccttttgtagggaggggtttggaagcagggtgtgattgaagattatcccgtaaaagtcagggtgtgagcttgagaaatatgtagaagtcaggcaagtaaagaaaactgtggagtagtatcatttatagaggtgttgaggatggttgtgtgataatttgcctgcctgccttcctttcctatctctatttcactctttccctccctccctctcacctgcctttcctttctccctccatccccacccccagcccccaggaatttatgagtctccggctaccctctcgctcactatgtagttaagatgacattgaccttccgctcctccctcctctaccactggttacaggtgtaagttaccacacccagcttgttggctctgggaatgactatgcttgctaggcaggcggtgtagcagctgaacatccctagcctcctgagttcacttttgacccaagacttgagacgctagagggagagccaatggagcatgtccgcttggcagttatatacacagggtctggagcccaggagtaaggtctgcctagacaaaggagtcttccacgtgtagctggtattttatgtctcagtgagtaggcacaccaaacggctgagaatgccatccaggaagcatcgctggttaaatgatttatgtggtaaaatctctcaacagagatagactgttctagtatcagatttggagacaggacatgtgtgcttgtgtatcttaaaatcagtgagtattttgttgcttggattcccccgtggaggaaatgtgttcctgggctgttcatcccaagactccccaccctcacaaggcgctttagggagcctgctggttctttgcccagccattggaacttagtgggggaaggctgaactctttttgctttgttatggttttgagtccttaaatgtaattggagaaataatgacagtatccttgggattaaacaagtccaatggattttaattttcttgacaaactgtaattaagaaattgtttggggagatttgctctctgagtaggattagctcacctatgtttttcatttggaaaaaagtaggtcttgcgttagaaagcaaggtcggaggagtcgtctccagtgctttatgcagtgcagagaaaatacgtcaagctgccaggtgaaacgttcctcaagataggagaaagagggaagcagacaattagaatacgctagggaaaggattctctttatccgctgtacctgcttttctcttcaattctggaaggctctgccagcagggcttttttcacccctattcttgtcctgccaagagttgcatatttttggcaaaatgttcattactggccaggagtacacaagaaagcctttgccagagaattaagcaagcagaagtctgtcaaaacaaatattctagcttgaaaatatagtcctgtagggggaggagtgtgtagtggaggaggccagggcatgctctgaggctgagtattcatttcataagaattctgtgttctgaaaggctgctgtttgccagtgctgaaggaagcagggctgtggtacataaaatgtactgacgagcaaggatgggttcctggggatgtggggtttgttcttgggtttggtttgctgctcatctgatgacagccttttctaagagggaaacggtttgataacaaatagccttttaaattaaatttaagaggtatttaacaaaactcatgtttacatggaaaaaactctgaggcctgaggatattaagaacacataaacaaatcctcacagaaacaccagtccatttcataagcatttatttggccaggaaatgccaatttcatatgactccaactttaaaagtattcattattgattctaaaagcaaaacttgtttttccccctccatttgtttgttatataaaaaattattttatacatgaagaagagtatagattggataaacgcaagtgtatttagattccctcattatgtagatactcagggctgctacttaaaaagttatgctctgagttggagaaatgtgtttatttgttagctgacgtttctagttggacctgctggggttgggcatgggtgctaactgtattaacttcaagagagatagaaaaaaagattgcatacaaaattggattttagttctaaaggatttcctgatggaacatctacttgctgctgacaatagtttctaagaattttttaaaaaaataaagcatgctaccttgtaatatttcaataaatgttgtatgtgataaagtatgttaaaagccgggtgtggtggcgcacgcctttaatcccagcacttgggaggcagaggcaggcggatttctgagttcgaggccagcctggtctaaaaagtgagttccaggacagccagggctatacagagaaaccttgtctcaaaaaacaaaaaaacaaacaaacaaacaaaaagtacagttaaaaacatcaatataatattagtaaaatacacatcagttcttccctcttcctggcagaacttaggtctgctgcctaagtcactcagaggatacgtgcctgagaacagagcacaggggaagtatttctgccctttgagtctctgacttgatccactttagttactggaagagaggttaattaatgtaaaatttctttagttttagtaattcagaagattaaaaatcttttgagggcttcaaaagatcatggtgcaccattggaatttgcctttagtaaatgtaacatttgttttctaaagaattataacaacatacttaaattccagaacagtaagcaaaatagcttaagttcactgacttgaaaaaacattcttttatactgcacggttctaaaataaatacttaaaagaaacagagagcaagccattctatcttggatttcattttccttcagatagaacagctagaacaaacattcttgctagttagcattgcctgtgtttttatgaagttaataactaagctgtcaatcacgccctatataaatacggaggttgaatgctttctgcttcagaagcacttttatttacaagagctgccagccaagatttccagagcactccacgggctgtttgctttgatctgtgttgagggctggtctctttatacctgttggtttgctctttatgatacctttgtgtgatcaggtattgggagagcagatgtgcagaataaacagaggggaaccagagctcaagagaaaccatgtaattatgcaccaacagctctagagcagagaatattttcccaactccacttagctgctgttatgacaagaggacagatgtcatggtgttcaccctggggaagctggagctttgctttaagcagccactttttatggagcggtgtgcatactctgactacagcttgcagaggtggcgcaggccctccctcccacgcctctgcctttgcccttttctcacttgctccttccttggggaatgtttaccacatgtctccgaccaaataatcagctctctgttgggagaactacctttgaattttcaactggaaatgtgccttttcacggttaaggccactttcaaaaacagaatagcgttttggtgggtccctctgtggctttgatttagagtttgtccagtaccgtggggaactgaacactgaaggcctttgcacccccagtgccacccccatagtcttcagtgagtgaaagaagggcagaaaggaagaggaactgcagtgcttgcctccaaaatgacctattctgagggatttctccttttaattaaagctgccttagcatttcccatgacgtaattacatttgcatattactttcctctaggaaacttgatgtttgaagtttgtaacttctggttttgtttgaaactagaaaagttttccctgtgtgttttaaactagaaattttatcatcacttaacaatgcctttggagggaaggttggttggttttcaggccctcagagggttctctgtgcatgggcaagtcctcttcatactcactgaccgtctgggccagcacttttccctcctgtgacactggcatgactcgggttttcaatggaagggcgccagtgcttggctccagggttagaaaggaggccttttactaatacgttttctccttgctttctgcccagaaaagttctaaatctcgtatttccaacagttactattgcagtttgttgggcttctggtgtatagcttttaaatattgctgtctctgatagtcagcagagggtaagtaatgcccaggtacccggttgtagcaacctcccttgggtacttgcagagtaaaattatttggtaaatgttaaggtagattaaagcttggttttgaacccggttctcctgcagagccttgttggggagcaaagaagttgccaggaaccagcacaaactagctcagctgtaaggctatctatagcctgtgttcaggcagaagcctcctaagaggtaggaaaaggctgacatcacctctgagcatctttaagccttagttgtaagtggagctacaggacagccagagaccaggccagaggagccagaagcaattacagaagatgggccatgctgcgaataccagtgaagaaactgctgctgcagatgtgccagggatggtggggggtagaggtggggaccctcgagccgcttagttgaccgatcctgccaagtcccccccagtgtttttattttacattcattcagggttcaagcctgtaattaaattttctgaacaaaggacctattaagttacaccatccagattgatgactgacagttcttccttcgaggtacacaaggaaatctgtagtgtgtaaagcaaaatacagactgtagtgaggattgaggaggagggtgttacagcggacagcagggtcgccgctccagcccttggccaggtgtctaggtttaccctaggatctaaaacagtgtcggtgataggccttgttcagatatccaggaaaaatatgtgcatttctaactagtagtgtattgttttttaaaagctctctctggccagttcagtggctctgtgagtaacgacaccagcacgtgtgatgcttttgtttgacccctgggagctatggtgtagagaatccacttgtacaggttctccttgggccctcacattctgtgacatatgcaggcacacccgcagacacaagcacacaacactcacacacttaaacagttatttcttcaacagtttaacttaatattattttttgaaatagggtctcctatgtgaatccggctgcctctgcctcctgagaactgggattaaaggtgtgtggcaccgctcctcccagccctaaataaaatgtaatttttaaaaatctctctccacttttgtgtaggcaccatatacttgcttaaaacattttcgcagtgacccacacacaatttatgatgtttattcttgggcccaaacttaaggcagcttcccagacttggagagctcagggctcagctccattagcttggcatctaggccctccacatccacacccatcctgtccattgttccaggcaagccaaaggcatcctggcctcaaaagcatctatgctatgccttttattaaaggctttctcctcccctctagcctcccagccgtcctaggagagggaaatccttgctgacctttaagaccaagcgttatctaagcagcacatgggctgacagtgtcctggtttaccccagctcatgtgtgctgaaccttcctggagagcttctctttggctcttgcttactgctcaggcctccataaccatattattcttctccctctccccctggtccccctggtccccctggtcccctttcccccggccccttggtccccctctccctccttctccctctccccctttccgtcagttttttcttttgcttttgtttttctgctcctttatgcgttgttttgtaagtctgatttaaaactcctgggaagcagaggtagaattatttgtgtgtagcaatgtcctctggagcatttacattgtggtgcttgtctgtcagctgttgactctgctctctgtggctcaggccagggctttggaaccactgggcacccttgtaccaggggtactttttggcttgtcagcacagtagtggagaagctagacctaattctgtccaggacagaatctaatttccaaatctttacaagagcagaatggtgtcacagtcacacactggagcactttcccctgggcactgccaactctttcttatgctgacgggctgacccatggccactactcctcagatcttatttcagctttctgggttatttttatttttaattaaaggcaaacttacttttcttggaccaagggcaagtgaatattcatgaggtgtttgctttctccactctagttttcttcggcaggtgatgccgtaggtcgggttctgtcttgacagtgattcctgctggcagggctgctgctcatggtcgtcactgacttgtccagggctagcacttgacggacagcacagagccgccatcccgcagcaggagctgcctttcctttcgtttggtcttacgagtttgaggaagatgtgtattttgccaagtcggaactttgaagacagcagtgtttaactcatctgatctgaaaattactcgtaaagtgactgcttatgccaaacgcaaagccaggtctgactagtgaatggcctactgtgactggcacagcctgctgtaggcttcagaaagactatttacacccgtctgggaaggattttataaaccattgtagccttgtgcacacagcgagcagtctttcatacttacagagcacctatgacactgctatagatgttcattcattagttttttgtttcagttttttttccccttcttggagctaggtttagttggaggctcataggaagccatgataagcaatcataagatatttgactttgtttttcgagacaggttctcttgtcgtccaggctggcctggaagccttgatcttcttgcctctttaacttactctcaactcaagtgtgcaccacagcactagccttcttattagtctgcgttcagtgtctgctcgggtttctcttagtggaccatcagctcctggaaggtgggaagttgtccccttcgtcgttgtgcctggttcagctcagaagtttgatgtataaatgagggtcttcaagcaagcctgtaagtgttgcggtgagggcactggacgtgtgtgccctcatctgaactggtagggaaagaataggagtcacacctttgcagagtgtgggataaaaatatgccaaatgaaatagagcagcttaggatgagtgggggaccttgccagccaagcttgagggcataggagcaaggcaagtgtttgaaagtgtggacttaagaggatcaggtttgctttagatgatcattttggcaactgaatggagacacactgtaactggattggaactcaaagctgcaactgggagatcagtgtgtttacctgagtggttttgctgcttagaacagtatagacttttggaagtcaggatttgggatttcatataccagcagtttgtttgtttttttttattaagagtcagtgtaaataagttttttttttacagtagaacttttcatttagctaaagaaggacttactaaactacttggttagggtagtttcatgaagtgaaggatatttcatcatagaaacatacctgagtttaaaaactgttagctatttaattttttaaacattttatctttgtcttgcgtgcgttcgtgtgtgcatgtgtgtgtgcgcgtgtgtgtgcgtgtgtgtgtgtgcgtgcgtgtgtgtgcatgtgtgtgtgcgtgtgtgtgtgtgtgtgtgtgtgtgtgtgtgtgtgtgtttatgtgtgcatgagcacctgtctgtttatctgtcctttctgatgtgttaccttgtttgaccccagtgttaactagaaaggttgggtagatgaatggttattcctgttaaatagaatgggaaactagattcagaagttgagtggcttaactacatcacatatctgatgaatagcagaactgaaaccaccattcagtatttgggcatattgttttggttttgctcacaatttcggggaataaaggaaaaaggaaaagaaaccataacctcattaggagtcatattttttttttttttggtttgtttgtttgtttgttttttgagacagggtttctctgtgcagccctggctgtcctggaactcactttgtagcccaggctggcctcaaactcagaaatccgcctgcctctgcctcccgactgctgggattaaaggcgtgcgccaccacgcccggctcttttcgaaaacttttaagagtgatacattaaattgtttcggggtaaagtcagctggtggtcagcccattgtgattataaaatgatgtaagaatggttttcttttccaaggatgaagtaaatatgtattgtagtatttgcacctttttatatgcttgttcaggaatcgaagtgtggatttactattagaatggactcatcaaaaggaatgcacaggtataccagtgtacaagcagcattgaatgcatgcagtaccatggttgtctcctttagtcactgggtctgtgtgactttctatgtctgtttgtgtctctgtgtgtctgtctgtgtcactgtgtgtctgtgtctatgctgtctctctgtatatttgtgtctgtgtctctgtgtctttctgtgtgtgtctctgtgtgtgtgtgttgatatgtatgtatgtgtgcatgtatgtatgtatgtatgtatgtatgtatgtatgtatctgtagttctataagtgtcaactatatctcatttggtagcttcctcttttttttcccctttggcacttaatatgttcagtgttgagtaaaacaatttagtgtttgatccctgaaaattataggtgttaattttttcacagtgctatataaaattttatgacaaattcacattttaatcattttttctggttctgtatgttatgtattttgaaaagctatctatactgtaaaaacaagtgagttgtgttctctgaactgctggaccctggtacattggccttcatgataatttatattactatctgttttcttcctttcatcttctcttcaaagtagggaggcaggggaagaggcctaggcgcgggatccaaggccaaagagcactggtttataatctgtggagaagaacaaagttagatttgtggatgtgttctctctgttctcacagaagctccactgagcagccgtgactcgtccatcttaagaaaaccagatgggtgggcgcctggcaaggctgggcagatggctccagtcctgctgcagtggtcgcttactcctgcatgctggctgctgctgctgctgcagtgggagcttacttctgcacgctggccttctctcaggcttttctccctttccacagatgccttctccattactgtcccaatacagatgaaaagtagggaacacggtttcagatttttattccttggctagtagcagccttttctaaaataaaattttcacattacttataaaaattgccactagaataggcttaatatagacagatatataatatagacagacagatatataatatagacagatataatgcttgagctgccttagtttcatggcatgttattagattttcctgagctcatagcgttttcttttcttttcttttcttttttttaaaagatttatttattatatgtaagtacactgtagctgtcttcagacactccagaagagggcgccagatcttgttacagatggttgtgagccaccatgtggttgccggaaattgaactcaggacctctggaagagcagtctgtgctcttaaccgctgagccatccctccagcccctcatagcgtttttttatgaaatataattatttaatgaggatggatgttttgcttcatatttgtgagttttgaatgttttttaataattggaatatttctagacttaggatatttagcaggcagtggctttgtaaggttgggtataatgactcactgacctccgagcgtcctgagtctctgtggaagagtaagtggctgtgcacagtacttttgacatgcatgcagctgcactaccagatgacagtgagtgccagtgatgctcagtaacaagtcatgacgtcagcatggccattgggaccacaaggcacagtatgcgagcactgggtctctgcacgggcttcttgcctccctcctcttagtcctccatttctttgaaatcatggccagtttgggctgggggatgaaaaaaaataacacttaaatttgtacttagaataggtgttctttagagttacatagcagataatttatgtagacaagtgtagactagaataaaatataacttttaataaataaccttacaccatgctgcttattcaggtggtcttcatgtgggtcctttggtggttgctaacctgctttctggcttatacttgctactctatagcatttagtgtttctgtttctaaccgacaattactttgtctgctttggactgtgaagagggagttgggggatggacagggtacctccatgtagataagttaggaggaaataagtcctataataatactgacaatactttcagttaaaattaacaatgataggagaaaagaataaatcaagaaagtaattcattggaaatatacatagaggtcagggaccaaaaggcaacagagcaagatgatttttttcctttgagtctttcctcccatctttgttgagccagaatgaccagaagtcatgattttcttgccttggcctcctgagtgctaggattaaggtaggtgccaccatgcatgcctctcgagagtgagagtcttaaagcagcagtgtgaacatcagaaagggaaggagatttcacaacatttcatgcatgcaaacgtttaatatggtgacaaaggcagagggagagaattccgagaggttaaaatagaaaggtgggggagcaaaaaatgaagtcattattccagttgattcgacatctggattaagaattcagaaaggagaatgaaatgacaagaaattatgatagatacagcacaagaaaatctagaacctttggaatatgcgtcctaacacagtacgggaaaggcagtgcacacacaccaaggccctgatatttagagttgatgatggtcgccagcgaggaaaccaccaacagtttacatactgggaaggaagcattgcacagcagcagccgtagaagtgagtggagtggggtagggagggaatgactcagctgtgaggggtacttgttcttgcagtggacccaagcttggctcccagcacccacgtggtggctcacaaccacataactctgcttctttaggatcccaggccactttctggtcaacgtgggcatcagccatgcatatagtacacagacatacggacagatagaacacatgggaataattattttaattgaaaagaaaataatagaacaatatctttaaaattccagggatatataattttattcccattttccatatttggctaaaattattaaccaaaattgaagattaaaaaatgtatttttatttttaaaaatgtgtgttttaagtaaggacaaggaagaaaatatttttttcattcagcttttgagtcaaaagcatctaaacattgattgaaaacatcagtttgcaaacagcattggttaactggtttgtgtttgtcattccttcagaacaccggaagacagtatatgtacagtttgtacaagtgtgtataggatctctatgataagcaagattggatgttttgctatgtatttcttacctttttaaaaatgggcaaataatagttgtagttaatagaaaattaggggaagagaaaagaaacctgatttattcttttatttaaaaaattgtaggaactgcacggtttacctgtccctctctgggcgctgtgatagggagctgaagagaaagcactgcccggcctttgagggacttgggcctggttatttgggaaaacagacacggaaggaaatgggaacagaatggctccagtcagataaagaatgtccaaagccaggctctgcaggatctcaatgggcaggcaggctgctttggggccaagatggttttctaggatccacagaggtggcagcctgatttcagagcactttcaaaactcaactttcatgagaagagcaaacccaagactctgacctgagaatgtctaatttaatacatgttattagcatttcaacagaaactgctctacttcccgctgccagttgcaggagccaggggttaaatgttttcgggggttttgttttttcccataaataataataataacaacaatgagctatacttattccagactatttttctggctattcaaaaaacaagtggcttagatgcccaacaatgttctttctgcaagtctgccaaacactggcttttccctttagtctgggatctagctaatctgtggaacattatcctatgttttgagagcttaccgacaggtgttgtgtggggagactgaattctctggactgagatagacagcactaagcaggaacttggttaattctgtggagaggagactcatactgtatactgaatactcggagttccctttcacttagtagttgggaactaactccgcagacatcacatcccactaggtatggacaacatcgaagtagagtagcatttacccagtgtgtttgtttgtttgtttccttgctttgtttgtaaataaatcttggtctttgaatccccagactttttttcaagtgtcctgggggaaatgaagcaccgagcctgattaagagcaaacgcatgctcctggcctcattctgatctaatgtgtgtgaaagttagaagtttggggggaaacaagttgcaaggccttctcttaggagcaaaaggaggccaggctgaggaccgccttcacacccctcctttcagcagaacagctgtgctttgttttagtgtggtaattcgtgctgccatgatagcatgcacacaacaggttttaccatctctaccatttgttagtgcacagctgagtgattgatagaagcctctttcttttactctcagcattccttggttgtctgtaggctttttatgatttctcttttataatccaaacaatttcagcccctaacactgcttttttaaaaagagacaaggtcaccgtgtcgcccaggaggattggaatctctgaccctcctggctctacttcccaagtgctggaaaatagcacttccacccaagcttagtcagtgcgggaagtgaaccagctgaggtacatcccagcacttgagaggcagaggcaggaggatctcagtgagtgtgaagctagtctgacagtgagttacaatctcaaaaaaaggtataaattttaaaagattatgaaaggaaccaaaattttgtacttgttacaaatctcattccaaagtgaagaaaactaaaatgcaaaaacaaagtttttggttatttttttaagaaaagtgaggtcataaagttcaatagtgctcgctttcttagctgccaatgcagctttctgcctggcatgcatttcttgatgtgacttaggtcttttttgatgccttttcatttcttctttccccattctccaactgcttctgtcatctgtttttatatatttaactttttactggctctttgtgattgccacatcctgcatcccaatcccactcaccttcctgtcctcttgcacctgccctccaccctggacctggccctgccagctcagtcgggctaccggttctccagcttgggaatgaggattaaaaagaaaaaagacagaggacattatagcaacgccttagtccattctgagactttcccaatccactttttataccattttaattacatgcaagtattacaatgagtagtacaatgaggaatcaagcaagacaatagtcaaggaacaggcaagacgataaacacaaagccccatgatcactccgctgatagctgtttcaaaggatgatcaaaatatctgagcctacttctttgttctaccttaaacttagattcttacttccttgtccttggccaatgtcagatgactgcctgaagcccatttccttgtcattggccaaagtcagattcctgccaggtggcaccccaaaatgctctccacacttcagcattgccctggctagctcacccagtgcctcagtctgcaaaggacacagagccaggtctaccactctcatgccctctggccatttcacccattcccaaaccagcagagccagctctattgtgctaccgaggtaaggtgcaatgagggccttctcttcctcatgctgttgtagatgtggggctggcagctctcccacctgccgtaggtggcaagggacgagggggttggtaaggagggcttctcaccctcacccatactactgcatggaagacaggtgtcagtgccagccctcccaatgctcacagccttgggccagctcacctgcaatccccacaaccagtaccagctctactgtgctgctcagaagcaagtgagggcacctttcatcaatccctgcacaatgggttgtcaggataagaagcttgcttttgttttgttttgtttgttttgttcttagaatattctgatttttccctcccttttttggtgacagtatcttgaaatgtactctggttgtgaagtcagggttcttctttgtccccatgtgtggtgcaagtcctggaaagtgtcatcacctcaaggtctccttattttttttttcctttttttaaagaattacttacttatttaagtatatgagtacactgtaactgtcttcagatacaccagaagagggcgtcttttaagtcatagttctacacatcagggttcttggttgatggttttgtttcagctaccactctgacttccagaatatctgctgagaagtctgttggctctgcctcaggctcctgtggggtgaaggcctgcttccctttcacggcgtctgctctcttcatgttgatgagagcatgcgtagggtgtagcttgctgcttctccgtccctagagtctgctgagcttcttctatgctgatattcacttctattcagacttaaggattttgcataagtttcccttggtccctatccttgcccctttctcccttttcgttagaagctgatggtgttaatggtggtctccttggtgctgccccatgggccccataggctcagccagtgtttttcaaatcttgtttctgttcctctgacacagtctgtcagttgtcctgtgtgcactgtgagcattattctccttttcctgtcagtgaaatttccactttactctcttttttggctctagaatttttttccttatttgtttttctctctgtagtaatatgttttgttaatacacacacacacattttttactttttctgagtctttctttaattcctcaaacatctttaagacatttgattaaacatctttgtctagcaagtccacccatattggtctttcacagggacagtttttgtctttttttcactgtgaatgagtaatactttcagattctttgtgtgccctcatgccttttctttctgttcaaaactgtatactttagtctagtgtaagtccagcatttgatcctccctggcccctagagctgctggttggactggtgttttgattgttgaaaactgtctgtgctctaggaatcagcctaaggtaaacaaattattttcaagtcttttaaagcatgagccttctcagggtatgtgggcttactttcatagtgtgtacacacacacacacacacacacacacacacacacacacacacacttgcttctttccatgtctggccggagaagctgaagccaggttccaacacatgattctttggacagaagcactctagaccgtaagcccagcaggtgatcttctgaggtgagtgcgtcacttagatacctgaggaagggacagaaaggacagaactgtgtctgcagaggcaaagactggagtcatgtagtcacaagccaagaaattttggccatcaccaaaaacctgtaagagctgaaggagggactctcttacaaagcctcccaggcctgctgataccaccagtactgatttcaggtttctagcctcaaggacacagtgattcaacgggataaaggagcgcatatgttgcttgttactgattgttttccgcagtccaactcagtgcctttaattatagcactcactgcacaacaaaccaccccaaaatttagtggctaaaatagcagcttataatttcccacaatgttaggggatggctgggttcacttacacagttctcttgtactgtgtaacaccatctgaagtgtcatctgaatcctgggagcactaatgactggaggctgatgggacttctccagcagggtgaatacagaagttgccctgcttttcaaaagcctaaagtcagtctgtacagtgccacttcagtgacctgcgattaaaggaagtcacaggcatcctggggacaatgagttgggaagtaaacctatctcttaaaagaaaggagataggaggagcctgctgctcgtgtctggcccaggttgcagagaatgattacagaatcaaatatcgcccagggactgcttgctgctgacaattttgagatgataggcttcaacaagaaacgttttcttttaaaaaaaaaaaaaaaaaaaagggtgtgtgtgtgtgtgtgtgtgtgtgtgtgtgtgtgtgaaggtgcttatgtgctgctgggtacatggggacatcagaggctgaggtgtgtgtgtgtgtgtgtgtgtgtgtgtgtgtgtgtgtgtgtgtgtgaaggtgcttatgtgctgctgggtacatggggacgtcagaggctgaggttggctcatgggagttggctctctccttcccctctgtgggtcctagagattgaactcagtttgtcacacttgggaaaagtacctataccttctaagccatcttgtcagcccaataaagttgttctaagtaacaatccctgtaagaaaaaaggccatagaagctgttgagatggaaacacacttaatagagcataagaaaggcgcactgactcgcctccctcccggcagtgaaatgagtggaccaggggcttcccagggggatgaccagcagccagaacactgcagaaccaagatgtctctcctggatagagtattctaatagccagcttctgaaagcgagggttagaaaagcattcctcaagtccaggaacctggcagatagctccagaagacaaggagggagggcaaggaggagagaaggtgggagatgtgatccactttagcgctttcagagaggtcctgcagcccaaggcttccttagtcctcttagaaccactgtggggattgcagaggcttgagggtttgttttggtggtgctgagggttaaatccaggcccttctatgtgctacacatccttcctaccttcctcccttccttccttcctaatttctctctctctctctctctctctctcctctctgatggtattgttgtttagataaaatgtatgtaggtcatgaatggtctcactcttggtgattcacctgcctccacctcctgagtgctgaggctgtgggcaggcaccagcaatcacccaggctttatctctgtctaattgccgcataattgctctcattcatgcactgaccttgaagcgctctagggtgtgtattggtgtagctcagtcttccttggggagaagattccaagagcagagtcagggatggtctggcaggattccaaatccagatctctttttaatgagttgtttgtgttttattgatttgcatttgatcataccctttgaaattcatgtgtatgctttgtcgtctttgcaggcttgtttccatttggggacactgtttttcttaaaatgggcttgctgttttatcagcaatcttagctaatttctctcctctgggctggttttattggccagaatgtagggaacattttaatattttgttgggctcccaattgaaacaccaactgcaaacttccatgtttttgccttcatcctttatttccacgtaacagcagagtttatggtgttcactcctagacctgggaataagtcctgtttttcaaagctgggcagagcttccccctttgctgttgttttcttcttagtcctttgtgcactactgtactgatccctggtctgagatgactgggaatgatgtgagctgtgtgtgtatgtgtgtgtgtgtgtgtgtgtgtgtgtgtctgtgtgtgtgtgtgtgtgtgtgtgtgtgtgtgtgtgtgtgtgtgtgtgtgtgtgaactctgtgtgagtcttgagggataacttcttttttttttttttgtatacatgtttaactataggcccttttccattgcattattatttgcagagaggtgcctttgggttttttttttgttgtttttgtttgtttgttttgttaagacagagtttctctgtgtagccccggctgtcctagaactcactctgtagaccaggctgcctgcctttatctcccaagtcctgggattaaaggcgtgcaccaccactgcctggcccagagatgcctttgttaaaggtccaaaacacagacttctatattttgacttttcctatatgtagcagatttttaaaaaaacatttatttattattataaataagtacactgtagctgacttcagacgcaccagaagtgggcgtcagatttcattacaggtggttgtgagccaccatgtggttgctgggatttgaactcaggacctttggaagaacagtcagtgctcttacctgtatgtagcagattttaactgcagagtttttaagatagcctgaagtgtgattcaacggaaatacttgtgagggaaatatatgtgtggggggacaacgtttggaggtcagttcttacctaccacattcttttttttttttttttttggtttttcgagacagggtttctctgtgtagccctggctgtcctggaactcactttgtagaccaggctggccttgaactcagaaatccgcctgcctctgcctcccaagtgctgggattaaaggcgtgcgccaccccgcccggctaccgcattcttttgaggctgggtctctcttcttcctgcagtgtatcctccaggtttgcagactcactagttcccaggtattttccctgcctctgccttccatctgacagtgtccatgctggtgttacagacacgtgcttccatgtcagttccggggctcacacttagggcactaggcttgcacagcaggtgcttttatgccctgagccatctcagtctatgtgatgcacaggtattccaggaggtcagaggcatctaggatctcttgaagccagagttctaggtgcttgtgagctgccaattgggggtactctgaaccaaattcagtacaatatatgttcttaactgataagttttaaatttttttctatgtgtgtgtatatctgtaagtatatgctatgtgtctgtgggtgccctctcaggcccctgtagttgcaggaatttgtaaatgtggtgctggaaactgaactcaggtcatctggaagagaagcaacagctcctagtctcaggccaagtcctttaaagctgttaaatcctaggctggattcagaggataccaagtggccaacctcagatgctttcaccggattcaagggctactgcagcacaccgcgattcgctgtgcaatgtgcagacagacctcatggcatgcaggacatggctgatttggaaacatggacaccttcaccacagaaactcctcccctcagcttgtctctgagcagtcctttctgatacacgtgttgtcactagtgcagattttatgtagtgttgtacctaagttgtagtatgaatttttgatagttacccgtgtgactagtttctcagagtagccaggccagcatatgcctatgaactatattttggatgccattttttgctgtcctatggtcttaattggggaagtttttgcagaagccccaacaggcatttccttggttggctaacatgtccttacatactaagagcaagattgacatatgtctggcacaggctgacagctcctcagtaatgctgacttgctttcacctctgccctggctgtcagttttcaccaagtctgcctgttttatcctgctcacaacttagggttgtcttttctctttctaggagggtgggctggtggaggatcagctcacgtgctcgctccttccttccttactttctccctccctcactcccttcctttttttctctttctctctccctcccttcctttcttccttcaatatcttctgtttttttaaaggttgttggatagttttgaatacatacataaacagatttatcttaactgccctgtcagtcactgaagaatacacctcaagtacttcttatgtctgtggaggtaacatcagcctgtttacttgttgaggtgaactagaaccaaactgtttgtaaactagtgagaaaagcgttatctgctgtgtttaataaatgtcagttcctctggagtgtctccctttgtccacggcagtggatattgctgggctgccagtgaggattggggagttcatttgttgctatttcctttttccttgtctgtctattcctttgtttctctcgctcagctagctcttaggggttcttacttgttttgagatgatcaaactcctctttgtttacttggggttgtggtactaggaatggaacccaggccttcacgagttaggcaagccgtgctttagaaccaggttgcagtctcagccctggaactgtttattgggcactagctgtgagctggggagcatatgtagtgtctgagatacactgggcttacatatgcttgggaaggtagagtgttctgctggaaggaataggggttgggaggtttcacgtgtgacgtgctgtaagtgccgtgatgggagcagcatcctaactcagccccattcttcatcgtggatgtggttcttttggttttaaagcctgtgtatgtggatttgtgtcatgggacaccatatgtggaggtcagatgacggtatgcagaggagcttggttcttactgtgtaggtcttgtgattgagctcaatcacaaagcgtggcagtaaggaacttttcccgctgaactgtcttgccagccctacaacagttcattagtggagctgtttcgaagagaatgttttaagagttaaagcctcactggggggtactaccctttgaagggagcaaagaaatggggccctgagtcagttctcataagaacaaatcgttgtaagactaacactgtatcttattagggcttctattgctatcataagacatcatgaccaaaaacaacttggagagtaaatttagttcagtttacagttcctcaagattactgatggaagtcagggcaagacctcaaacagggcaggaagcctggaggcagaagctgctcactggcttactttctgtggcttgcttagcctgacttcttctagcacccaagaccaccagtcctacatcagtcatcagtaaaaaaatgtaccacagacttgctcataagctactctcatacgtgtgttttgtcagttgaggttcctccttccaaaatgactcttgcttctgtctggttgacataaaattatccagcacaccctgacttatgagttgttctggcttccttttatacatctgcctcgatgtcctagcagagccaagctgacactggtgccatatctgtgaacctactgcatcatgaacagaataaacttgtttcctttgtgtagctaagaagcctcaggtattttgttctatcaatggaaaactggacttgagataacagggaagatgtcctagactgaagcttgcctcagtcaaaatcagaaggttcatctagaattagcctggtaaaagtggtggtaacatgggagatgtctttccagctagggtacagcacttggcacaatgtgtaggctaacaagagcaccgaatgatgatgctctgtatggtaggtatagaaaagaaatgtcaagaaaagtaagtcagccatcaggctaatgactttagatttttctccaaggaatcagtagggagcattaaccttgtgaggttatttgccactttgatgagaaaaatacagtgacatgcaactttatctttttttcaaaacctatttttaatgatggtttttaaatgctttaacttcccttgtagccaccacccaccagagatagtgggaaagaaagtggatctccttagaaagggtctttggagcaactcccatctgtgttgtctggaaatcagcagtttagttcacaggttacttcatggatgcaccagcagtcccgttcaggatagcaaacacgaatcagcgttggtgccactacctagcagagacagccaggcctcagcctcagctccagtaagcaggacagaccaggaggccaggagaagttctcagcaatgcctctctcatcaaagtaaaaatgtaagaccaacaagtatttcatagctagctctactagcaaacccagttctgcctccatcactgtcgattcctatttatactctctccaaacatcacatgtcctctccgggtcttgctttagcacatgtctctgtctcagctaacatcactcaaccaatcagtctaaagccacagaagctgcaagaaaccgcagcactccaccagaagtcgttttgtgtgtgtgtttctttggagttctgacaaatatagctcaactacgcagtataaggtggatcagtacatatgtgttattatgtagacatatagaatccttcatcatgtccaagcacatgtcctttcatgtgcttgctttagcagaacatcctttcacctgtgtctgctttggtaaaatgttccttcatgtgtttgccccagcaaaacatcaaccaactttccaaagaacccttaagtttccacttcagtgacatggtggttgtcattgtgtagcaaatgagagataagcctcttacatgctagaagaaagactcagatgtggtctaaaatggtatgtggtcttggtcttattattattattattattattattattattagatattttcttcatttacatttcaaatgctattctgaactcccctataccctccccacaccctactccccaacccacccactcccgcttcctggccctgacattcccctataccggtgcatatagcattcacaggaccaagggcctctcctcctaataatgaccaactaggccatcttctgctacatatgcagctagagacatatgagctctggggttactggttagttcatattgttgttgttcctataggattgcagaccccttcagctccttggatactttctctagctcctccattggggtccctgtgttccatccaatagatgactgtgaacatccatttctgtatttgccaggcactggcatagcctcacaagagacagttatatcagggtcctttcagcaaaatcttgctggcgtatgcaatagtgtctgagtttggtggctgtttatgggatggatccccaggtggagcagtctcagctccaaactttgtctctgtaacccgttccatgggtattttgttccccattctaaggaggaacgaagtatccgcactttgttcttccttcttcttgagtttcctatgttttgcaaattgtatcttgagtattctaggtttctgggctaatatccacctatcagtgagtgcatatcatgtgagttcttttgtgattgggttacctcactcaggatcatatcctccagatccatccatttatctaagaatttcataaatttattgtttttaatagctgagtagtactccattgtgtaccacattttctgtatccattcttctgttaagggacatctgggctctttccagcttctggctattataaataaggctgctatgaacatagtggagcatgtattcttattaccagttggtacatcttctgggtatgtgcccaggagaagtactgctggatcctccggtagtactatgtccaattttctgaggaaccgccagactgatttccagagtggttgtaccagcttgcagtctcaccatcggaaatcatgtagaagaatgcaaattggtccattcttactccttgtacaaagctccggtctaagtggatcaaggaactccacataaaactagagacactgaaacttatagaggagaatgtggagaaaagcctcaaagatatgggcactggggaaaaattcctgagcagaacagcaatggcttgtgctataagatgaagaattgacaaatgggatctcataaaattgcaaagcttctataaggcaaaagacactgtcaataaaacaaaaagaccaccaacagattggtaaagaatctttatcaatcctaaatctgacaggggactaatatccagtatatacaaagaactcgagaagctggactccagatattcaaacaaccccattaaaaaatggggtacggaactaaacaattctcaactgaggaataccaaatggctgagaagcacctgaaatatgttcaacatccttaatcatcagggaaattcaaatcaaaacaactctgagattccacatcacactagtcagaatggctaagatcaaaaactcaggtgatagcagatgctggtgaggatgtggtaaaagaagaacactcctccattgctggtgggattgcaagctggtcttggtcttttaaaataagcttctagctgggaggtggtgatgtacaccttaatgctagcacttgggaggcagaggcaggcaatctctgagtatgaggccagtgtagtctacaaagtgaggtccaagacagccatggctatatagagaaaccctgtctcaacccccacccccaaataagcttctaatacatgcatcccaaaacctttgacaaacctacacatagtaaggcatgattccaagtggtggttcatcaatcaatatgtctgtgaaaactcagatagttgtggcaagttggagacgagaattagcataccatctgatacctggggtccaagatgacttgagtaagtggagggtagattaggcatcttatattatcactctcatcccgttcttgaggttctgtttgacaatgcatatgaattgtaagtattatataccctttgagtacactatataaatatttagctttttcgagacagggcttctctgtgtagccctggatatcctggaactctgtagaccaggctcgcctcaaacttagaaatctgcctgcctctgcctcccaagtgctaggattaaaggcgtgcatcaccactgcctggcttagcccagtctttaggtacatggaaagttttaggaatacttgcaggtcttttgcaacttgtatttttattttgaatttaaaacattttattattagaattgtcagtgtatttaataatgacaagaactgcccctcattacaccactactcggccttggctgtagtcagcattttgcctatcttcattcttcatttcctggagtttgtacataccatgtcatttttcctataaatccatttggtgtacatgattaaagaaatttaagaagaaataccatgtgctggagagatggctcagtggttgagagcattgactgctcttacagaggtcctgagttcaattcccagcaaccacatggtggctcacaaccatctgtaatggggtctgatgccctcctctggtgtgtctgaagagagcaatggtgtactcatatacataaactaaataaataaatcttttttaaaaagaacaagaagaaattccactgttataatcaccacatctggcaaagttaattcttcaatctgcagacttcctttaaagttctacaggtctttctgtagttgatttattcgaaccaagaaccaggcaacttgtatacattgcatttagtctgctttagctcatctctgtgaatgtttcagtcttgaaagccttttgttttgtaatactttatattcttctgctgctgttggcttgtttgtagaatttggttttcttatgcagtgtacaaaattgtgagtgctcttgcaatattgtttagtttgttttattggactgccatatttctagtaaaatggcattagaaatacaacctcgattacttccagattaacttttatttaagtagaagtatttaggttctgattataatatgagtgctgtgtgtatgtgtttgtttttctgtctgtctgtgtctgtctgtgtttgtggtctgaaactctatgtattatagatcaggctggcctcaaactcatagcaatcttcatgtcttagttttccatgttctaggattagaagtgtatagcagcatcattgctgattggttttatgttaattgtctagtattaatttctgtacaagcaaatgccaataactaggaatcagcagttttgtgcccagattgagctccagtgagcacagcgtaatctaaagaggaacagatacttgtatctgctgtgggttgcttcacagcagaggaattaggagcaggagggagcccttttgtaaagagcatagagctcttttgtaaagagcatacagcttttctgtcctctgtccagagggaggcaccacgcctcccagggctcttcattatgtaagcatccttgagtggacgcttccttggacaggacaattgctgcttcagtgtacgctgtttggtcatgtgaacttctagacaactgtgcctcaatggcaccatcgtttacagctttctttttgtggtggggggtgtttttgagaccgaatttcatgaattccaagctggccttcaactctctatgtagtcagccatagccttgaaatctggatccttctgcctccacttctgagcactaggattacaggattgtaccaatacatgcagtttcatgtggtgctgggtttcaaacccacgactttgtgaatactaagtaaggactctacatctgagccccagccccagcccttatttctaatgtcgccttgatttttggagaattttctcatgagattgctatgttctcagttcctttcattaatctgactggcaagttgggactaaaatcatgcattttgtctaatacagcatttaattaattgaaactgctgtcagtgaaatggatacaaccttcagtattaacatcagctacagaccctagcacctgagatctaattagcaccacattggtgtttgtacagcagagggctccctggttttctgtattccctttccatctagccttgggcactaatccagatacctcaaaaagtctttatctcagcctggagattgaagcctcggacagtttcctatgcactatagttctgccttgggttttggagcagacctaaatgaccttcatgttcgtgattactctagttaaaactgaaatcttttgtaccctgtgatcttccttatagtagaaggaattgactgcagagtttacaaaagttgggccacttcttcacaaggagtttctatgactaaccaaatgtagccttatcacagatagatcttgactgctagtatttagagcatcagttttgaggaaggaggcaagttaaaggcagaggaaagtataattccaagggtatgcatggtgcttccttaagtaaagcctccgtctgtaattttaggagactgttttatattgggtgagaagtatgtgtttacattgtctctagcatagcctaaaacccagctggtaaaccttaaatgtcatagctcctgtcatgtcactgatttcaggctttaattttagagaatatgggtagttggtctagcctgccctcttttgcccttatcaccagccccatgcagtaacttcttagggctacagagaaagacaagatgcccagagatgtcaagatgtcttgtgcacagagaggtgacatgctgggtccagggccattgagttcagtttccttacggacatgtttgtaatgttttattttctttagttatttttattttatgtgcatttggtgttttgcctacatgtctatctgtgtgtcagggaccctggaactggagttgcagacagttgtaaaccaccatgtaggtgctgagaattgaacctgtgacctctggatgagcaaccaatgttcttagctcctgaatcatctctccaggtcccccaacacccccagcatcttaacaaggctatcagattgtgcttaaagaatcttctccacgtggaggacagacatggccattactaggtttgtagggttgcaaggtataggggttacaacagagcaacttccttggtgaggaaggcagttgagacactttcttgcctttgttccatctcctggcctagtgggtgtcctaaggttgtgctgctgccatcaccacagtgctgtctcctttcagtagctgtgacgtcacttcccctcattcgctgtctgattgagactgtctgtcttgaagggctgagtggaagaggaacacttcattctttttttttttttaaagatttatttatttatattatgtatgtgagtacactgtcactctcttcagacacaccagaagagggtatctggtaccatcacagatggttgtgagccaccatgtggttgctgggaattgaactcaggacctctggaagagcagccagtgctcttaaccactgagccatttctacggccccagaaacacttcattcttataacatcctttcaccttctccactatggctgtttatttaggaaaattacgcagtatcatcatcagactggtggccgtcgtctaattgctagagttcaggtcattgaacaggatgaagtgtgaatcttctagttaccctgtggcctaggtacatgaaagttgtagcacctaaactgtctgagccatcatggcggctatagtcaggaaaatattttaacttttcaacatagatcagtgtcatggctggtttatatcaacttggcacacggtagagtcacctgaaagaggggaacctcaattaagaaaatgcccccagaagatccagctatagggatggcattttattgattagtgattgatggggagggtccagcccattgtgggtggtggcatccctgggctggtggtcctgagttctataagaaagcaggctgagtgctgggcggtagtagcacacacctttaatcccagcacttgggaggcagaggcaggtggatttctgagttcgaggccagcctggtctacaaagttccaggacagccagggctacttgaaaaaccaaaaaaaaaaaaaaaaaaaaaaaggcaggctgagtaagccatggggagcaaaccagtaagcagcatccctccattgcctctgcatcagctcctgcctccagattcgcgccctccgtgagttcctgccctgacttctttcagtgatgagccactcattatgtggcagtgtacacagagtaaaccatttcctccccaacttgatctggtcatggtgttagttcatagcagtagtgatccaaactaagacaaccaaaaacttcatgtttttatcattttgtatttttctttatggctattttcagaccttagatagagtaggatttaattttgtatatatcaggaggggaagattcctttttaatctcagtatcagttatcctatcattattggcttgtttgttttcttacttatttggttttctggagttcattttggtttgtagaagggtcacatgcacccaaggtggccttgattttgctgtgtagctgaatggttcttatatgtctggaaacctaactggatgagttcccaactttgtactttattcttatcctgtggtagccataaagtcataagtttagaatctcttttcctatacacctatacacagggaggtgttgtggggcaataaaggggagatgggacagagacagatagggtcacagagtttttcttagaattatattgcacacattaagagtttaatcttggtagcattaaatgtttctgttgtgccccccaccccccgcgcgccttaaatgttttaacccttgtgcaaggtgcatctctatctttccctttaaggccaatcttcttatatacaatgtgatagtgcaggttaaggtgcctcaatcgggaaaggctcttgatgccaaactaaagtctcgagttcagtccctgggacccacatcgtggaaggaaggaaagaaggaagggagggagggagggagggagggaggagggagggagggagggataaagtgagagaaaggaaaagaaagcaagcctgtaagcaaaatcttatctgaaatggacctggatcttagactttagtgtgaaagccaaccacaaagccttccaggaaacaaaacaaaacaaaacaaaacaaaacaccctctgaaggaggtggagatttcttaggttgtagaatacatgaatcatagaagggaaaactgataagttgttggacttaatcaaatatgaataagaaagtaagtaggaaagcatatgtgttgtgttggggtttgtggcgtgtgtataaggtaaaatacagcctgtttgcaacatgggtaaaaaggtttgaatgaagagcacacaatggccgagacataggaagattgattagcagcgtcagtcagcaaggattgtgaacagaatcccagctatcacaaggttggctgaaatgggaaaaggtaaacgccatcagcaagggctgcagacagtacagtccttccagagtttttactttatgttgttggagtataaagtcaccgaggtgtttgggaaactatgggtttcctaaatagtatgcagatatcacattctttattctcagatattatcctaagagaagtgaaaaatatgatcaaaaaaacctcttgtttgaggatatcagaatagcagttagtcagaatccctctcccccaaatagaggtacccatatctgccagcagaatgaattacgaatttatgaattcacaccgtgggttctacttaccagaaaaaaagtcaaactgctgctgtagccaatgttgtgggcaagtctcagcaactttatgtcaaatgagaaaatctagattaaaaaaaattataaaatgtaccactatatttttgtgaaagtttaaaatagatgaaactaatctgtgacaatagaaatcaagtcagtggttgcttggggaggcaagagctggccacagaaggagcttcatgggaaatcatgagtctggatagtaagcagtgtgtgtgtgtgtgtgtgtgtgtgtgtgagagagagagagagagagagtgtgtgtgtgtgtgagagagagagagtgagtgtgtgtgtgtgagagagagagagagagagagagagagagagagagagagagagagagagagagcgagaacaagaactgactggcagtttgctgcctgccgaaatgctgctgcctaacaagctgggacatgagtctttattaataagagcatgggcaggttatgagtatttctttaatagttaagacttctgtttacttttcataataaacagcccttttttcctaaacgttttaccaagtttgaggggtttggcccacttttcagcttgagaaactatttctagcaccttctctgagctcaggaatagtttctatcaatatggaaaaggtaatccttatggtgttagctggaatgtccctgcagaagctcactctccaagtccatccttttgattgacattctccaaggcagtggttctcagtcatttgtcattatgccttaccaaatgcttttggcagtatctgtggagattgtcattgtcacagagagaagggtgctgttctactggcatctagtgggtagagacctcagaaacttggaaccattctgcaacacaaaggacatccctcaccctgaaattctacttggtaaaatgacatggtacccaggtttggcaaaccttgttctggctctcccctctatcactgaagttgaggcagtctgtcagttgttgcctgtcatcacagctcaatcagttgtgcacactgggctattcacagtacatccctctttcctgcctttataagcatatgccatcatggagataaggccacacagccaaagtacttacaactgtgtatcatttgtgttgactacgagtgtaagatgttgtagatttccttttcatctatttcattaagtagtttttctttaaagggggattataaaaggtaatgttttctcttttatttctctccacagaatgacaggaagagagtttttctctcgtttcccagaactgtacccatttcttctcaaacagttggaaactgtggccagtacagtagacaggtaattagagaatacactggaagaagtgcagacacaatgtcaagtactttattaatcatgattttaggttggactgggtggctcaggtctgtaatcccaacccttagaagatacaggattaccaccagatatgggctacataaccagacccgtctcaagaaaataaacattgggagaggaaagagctatggagagatggctcagcagttaagagcactgtcaactctttcaaagaacctaggttcacttcccagcacccacatagcagctcacagctgtatgtaactgcagtccagggaatctagtgcctgctgtgtaagcacagtacttcaggtacagtgaagtgtgctcacatatatacaggtaccgtgaagtatgttcacatatatacaggtgaaacacctgtaaaataaaaaatgtaaaactaactctggagtagatgaaatgactcagtggggtaagacaccaacaactaagcctgacaacctgagctcatttccaggaccttagtgtgaaagtagagagccagctgtcaaaattgtcttctgtcttacagacagacagagacagagacagaggaggggaggggaaaacccaaaccaagcaaggtgaaggggctcctgaggctccacccctcccagaggatctaccacagtggtgtagccgttggtaaggtacccatgctcctgtaaacaacctttcacccaggcttctctaagcaactgtaataaaacttgtgagtcacttgttaaaaacccatggaagtatatgaggatctgcagtaggagggcatatatgaggatcagagatttcatatgtaattatcactaggaatacttaatgtatcctaataaacaactttcttttaagtttgatttttatgtatgtgtctgccttcatgttagtatgaacatgcacatgggagcccacagtggccagaagccggcatcagacaggctgcagacagtacttggtgactccgaggggtgcttgctgctttctcagaacccatgtcagtcattccagtccctgggaatctgatactctcttctggtcttcatggttatattcacacacatgcacatagacaccccctacacacacacacacacacacacacacacacatatgcacatatgcacataaaatctttatgcctttaattctagcactaaggagacaggcagatctctgaattcaaggccagtctattcagagttccagaacagccatggtcacacagagaactcaggtctcagggtgggatcaagatggggtgaaaaagaatttactgttttcattaagtgaagacctgaagacctgtgttcagtcactaatatccatataaaaagcttgttgttatgccatgtgcacttgtaattctagccctgcagattcggacatagaagggccctagggcttactagctagccaacctcacttcctgggtaagtcccaggtccccatgagaaatcctatctcaaaagacaaagtggggttggcaagatggcttgagccctgatgacctgtccgtgtgccccaaacccacatgaaagtaaacggagagtgacacctcacaagttgtcctctgtgtgtcatggcacatgcacccaataataaaaactttttacattttaaaaggactagggacacagttcctgaggtttaacatccaaggttgacctctagtccccacacacagacacacagccacacacacacatacttacacacatagacacacatacctgaattatttcttcctcttattttttaaaatctttgtctacattactaaatgtacttaatagattcttaacatcctgtattactggcctgttgcagcttgctgctgtgaaacaacagctaagttgcctgtgatcaaatgtgggtccctgagcaaaaatgatcaataattttagaaatataaagcagagtcattttaaagggcattgagtcccctggggcggcaagaaatggtgtcattttgtttcagtcttactctgtagctgacagtagactttttactatggatatcttagaacatgcaactttttaatttttctgcagtctttgtactggtataaatacatataaactgtctgtaatgggaaaatgtaattatatcaatgaaatgtatttttgtcaagatatcttttctctaattgctagctagtgcagggagggttttctggttctagtgagtaatggcctagtcatgtttcctcaaagccatcagacagggagagcttcccatttcctgaaagctctggacagcacagtacagaaagtgtgactccagagagtcactggctttagaagagggttgcgtgcaggacccttgctttgccagaggcttctccttgtgcacgttaaagtgaaacaggaaaacgtgacaaaatgtggggctggagaaatgactcagcagctaagagcactggctgttcttccagaggtcctgagttcaattcccagcaaccacatggtggctcacgaccatctgtaatgggacagctacagtgtattgatataaataaaataaataaatcttaaaaaaaaagtgacaaaatgtgtttgaaagcagtgcctgccttcttcagtctgaaatcttttatgtgtaatcactttccttcagtgaactgggagagcctgatcgccaccctggcatgttcctcttactcctggtgttggagagactgtacccatcgccgatggacggcacatcatctgcgctcagcttggccccttttgttcctttcattatcaggtagtgtcatattgcagggaacttgagagaatgttctatcttgttcttatttggagaattataatcaatatattgtcttagggagccattttgtgaaagcaagagagtgaagctttctgctattgctcctgactgttctccagtgctttctgagcagttacctgtgcttagcccctgggtgtgggcgcctatggctgtgttgatagtgttttccttggagaccggctagtgggtgtgtgatgttgatcggaagtatcccttttgaaaacactgcctatggtttgtattgaacagtattgggccagccaacacaggtatgctgggcgggcttgatcctagcatgtattccctgccctgtggtttaaaagaatattaaggcacctggctctttactctgtggaagtcagagcaaccaggacctggtgtgcctgtggcaatgccacttagcccattgtcccacttaatcttctgtttcaaacttggggtgcctaaaagagatgcaaaagcataatgcatgtgggtgcacaccaactacaggatacatcaccaaaggccccagtacctcttctgaaatggctgtcactttttagtttttgactgtgcaccttaacgtgtgatcctcaaaaagcatttgtgttttcctatgactcactttagaagctataatattattatcagctcttactcttcggagttcttgactagcatgtgcctttcatggatctattgaaatttgagatggacttggggaagcacaagaacacaaagcttgagtgtgtttattatttgtgcagcatcttgtgttctgcttcctgggctcacatagttgacttacgcatttccatgtgagaaaccatgaaacacgaggttctgacatgtgatgctgtggccatttgtttgccaccaagcctgggctgtggttgtgctatctgtgatcacagaggtgactcactgggactggcttggtttccgatacaaagttaccgtctgcctcctccagtattgggtgattcattttagaaatttggtggtaaattttactttcaagagccttaaaagtgttctctttcatgaacatttgtgtgtatttgaggggaggatgcagctaagcagtgtttcagaaagttgataaaagggaaaaggtacaaacagtatcagcgccattagaaatcaagatgtgctgtgcaccatcggctatgtcgagaccattcattctgcagaggcttttaccacaccatctgttgttggttgttcctagagacaggaagttgctacattgaaaatactcttccaaatggacctacttatatataatctgagtatgtgcatggtcctgagagatagtcaaagattacagtagtatagaagatttaaatactactctgaaaccaggttgtagagagcattgaagtccttagtaagtgtgtgttgttgacataggcatgaccatgtcagtgaagctggtgcctggccccatgggtgaaatttccctggataagattcagagaatggcagcaccttcctctcaaccatgtggggatggtgatggtgactgcaggaaatgttcacagctactccgcaccacccgcgttgggagcccaagttcatggcctaaagattgctcccctacaaagagactgctcctactaagattagctaatcctgtctcctttttcagttgtatatggtaaccctgcttccttcttcagctggctgtgtgcaacacccttacctccctgtccagttatatataaacatactgagcttccagtgcactgcagcttccccaatagagagtctagaccgcctgatcccatatattctgtgtgtctggtatgtcctttcctcattacctagttagggttccaggccccaagctgtgcaaggatgtataccaggaactgagaacatcatctgggttagtttggttggtttagtttgtgttgtctgtttcacagtgttggggatcaaacccagggccttgctcgtgcttggcaagctctagcattgagttgcatcctcagccctggtatgtaagagtctacccaggaggctgggaagatgctttagcagttcagaacacttgttcttgcagcagacaaaggctccgtttccgctattcagatgatggctcacaactgcctgtaatttcagttccagggaatccagcaacctcttctacgctccacagacaccaagtacggccatgatgcgcacatatatttgcaggcaaaatacacataaaatcaataaatctaagatttttaaggactttagcttatttctctgatactgttttgtttgtttgtttgtttttgtttttgccagcctgaatcttagaggtagctgatttggtttttctggtctgtatgggcagttctttgctatccagccccttcctccatgagtgcagtgccttcacatatagccactccctctgcgttgtgacagcatgaagcagaataatggggctttacaggagctccaagaactgcttgactacagtttaccagcgcctgtttgtcgtgctctctaaagggttaaaggaagggcctggagcctttcagttcctttcacaggcaaatttcaagcttccactgaaacattacaggaaagcgtatagtaccatcctagagcgccatgactctggagtcctggagagcaaaggcctggactgaggaggctcggcttcagagtgctctgccacttctaattgtgacccttgcatgctgcggtgttcccgctctggactaatgtgctctctgtgtgaaaagcacctgagaggtcagcagctcactcactgagggagacgtcgcctcactgcacttgactgtgcgaggcacttagaaatgtccttcctccccgcccctcggcatcccccttcttcctgcttggtttaattcattttcagtacccatcttccccagtccatttgttttcctttgtttaaagtgaaatctgcttgcttgcttttccctgacaagtactaagtacaaataacaaaacaagtacgttcctgtagaaaccatgtacctatggggtggacattttacattgaaacaaatctctagtgaacaatcaaagactaggaaagcttgtgttcatgtatttagaatgtttcgtggaaccttaggattttatcagtcatatcaaagaggaaggtgaagatagaacaacttagtcttgtgacaggaaataatatgactctggtcttgttttcctttaaacacataatgtagatgataacgttgcaccttctccaggttacgaagcaaagcagctgtgtgctgtgttggggtattgtggctcttacaggaaacagtaacgagctcctccttccgttgagattctgctaccaagaggtctcctttaagtctgtgtgttaaagtgctgttttgtttttgttgtgggtttgagatggagtcccttgcagcctacactttcctgggctcagcgagtggccagagatgaccttgtacttttgatcctcttgcccctacttcccaagcacccgcataataggcataataggccagcgtgccaagattatgaagggctgggaattgaactcaggacttccaactaacctatgtgccatgcagccatctatctaccctatttgtacctgctctgacttcccagaatccttttagataagcagagggcaacatttgctttaaagagacaaaaaaggcaagcagagtggctctggcaccaccaaggtgaaagtcctgcctggccctgttcttgtgctgtcggctcctgatgctcccctcttcaaacgtgcagagcaccccttccttgtcattcatctctactctactgtaccagtgctcagtgcttgctcttcagcataagctattctccttctatgccgatcaggcattgctgttttgtggtactttcccctacctaatacaaatttggatactgagttaaactgagtaatgtaaaaatgaaactagttggagtcaaaactttgtatgtgagctgatctgtttatctctgaagtattcaaggacttctgtagccacggtgatggtttatataggtaggggcttcaactgggttccatgttctacctggcctttgaggaagtctgtattaacatgagctctgccatttgcttatattgtgagtcacctctctgatgttcccccttcccattcaaacaagttttgatcaaattaaattcttggactgaatgttaccttggtcctctctggcctcatgagcttgggagcttcttggagtctgagctcctctctgactgtcctttagagaagctctgtgaaagtctgtcttacaggaagtgccctgaggcagggttagtgtcataggagagaagcagcagcaaagcactgtccttctgctgtaactcatccagttataatggagccagtcatggaagggaaagacacccagactaatacagcaagaatggaaaacccgggtaggagagcctcagtgtaatggggttaaatgtcctgcttacaaataccgctcctaggtttatgtgtaacagagcccaggaggttgacagtcttttataggaaaagaatagagaaggataattttaaggctgcaggtggtggtgcacatcatttaacaccttaaccctatcatttgggagacagagacaggagaatctctgcgagtttgaggctagcctggtctacatagagagctccaggacagccaggactgcatagagagactctgtctctctcatctctggtggtatataataactgcacatatttgattggcaggtaacagtgtcttttcaatgcccatgtgcagtgtgtcccacatgtcattgcatcctaagacatttgtcatttcttgggttgagaacatttagactctgaaacagcaggcattttttttagcacttgttttggtgagtctctgccaataaatgggaaggaaacccctgaagccagatgaaggtggggttctagggagagtgcactgtgttctgtgagagcatgtcctgagactcaatgactgacaaacatgggttcaaaagtcagcattttggggaccatgaggcatggaaatattgtgctgacaaccttcaaaaaactcttcaaagtggaaaagcagtgttttaaatgactgcatagttgtattgatatcagctatgtttgacttgctcatcaaagtatcactcctaagtgtgctgtgctttctctgctgagaactagaaaggcctccctaagatgagtgagtcctggctgagtcccttcagtgcttgatggcttctcggctgctgaagtgaactttagtcagcatctactcacttaaaggaaacagattcagttgcaacttataaagtgtgtgacatagagaaatgactaagttgcaaggttttcaggagtcagggaggcactgcaagttcaggccacacccattatctctatgcagcttggggaaaggaaggggaaaaggaactggaaagccacgaactcagaacttgaactttatttatgaagtatgctttcttttttaatgcttggttctcgacagatggttgaatgtcatattggtccctatacttttttattatgtctgatatagccctttattgaagatagagactagcaaattaactcaacaggtaaatgccctggacagcaagcctaacactgacctggtcttgatccctgggaccctcctgattaaaggggaaagctgacttgtacaagctgtcctctaacttccatgcaataagtatttttttgagttgtttgttttttgttttttgtttttttttttttgagacagggtttctctgtgtagccctggctgtcctggaactcaatctatagaccaggctggccttgaactcagaaatcgcctgcctctgcctcctgagtgctgggattaaaggagtgcgccaccactgcccagcaagtattttttttaatatagattctaaatagacttaggaaactgtattggtagcttgagactagagatatgtaccatgttctggtctttataattaagattatatctgattagaatgtagggtgtctgctttgtgtgagaaagttttgggaatggtattttctgtgagcacagggtgcagcgtgacacactgctgtcagagagcagagtttttccatggtcctcctgaactctgaggacaggacaggcccacattgtcctgtttgttattctgctctgggaccctcactttaggagggtcattggtaggctaatgtttatttgaggcagtgagcacagtgtggagcaagctagacatctggaagccgttaggctggggaagatggtaatggtctccacacactcagttaggctggggaagatggtaatggtctccacacactcagttaggctggggaagatggtaatggtctctacatactcagaggctgccatatggcagaaggcacacaatttgtcatttttcctcccagtgggaacgtaagagagattgtgactctgaagacaaaggagagttttgtgaaaggcagtgttctccatcaaaggcatgaatagatttcctcatagtgggctgcccagcaataaaagtgtttgaggaaaactgatcatacgtcggacacatttcccaaaggatctctgatgcatctgaggttgggcaggatgattgtcaaagtgtctgtttgggatgccttgtttcagaatgagtgctgagtcttcttgtaaatgtctcacacctgtgtacacattcttttcttttttttttttttttttttttttttttggtgtttttcgagacagggtttctctgtgtagcctttgtagaccaggctggcctcgaactcagaaatccacctgcctctgcctcccgagtgctgggattaaaggtgtgcgccaccacgcccggctttttttttttttttttttctgtgtacacattctttcatcttcctcgatcttactaaggagagcattggggagccatcttggcgtggcctacatggtgtggtggtctactcctaaatgatgccctccagaaattaatccatttaaatttagcttctgagtaacttctgtaactttgttctggatgtttctgaaaacactcttttggcctttgtgatgttatgtctgaaaagcattccttattgatttaattatctttttctgtggttgctgtatttcttccattccagatgttggcttaagttgcctttgttttctcacaagtataaggaacatctgagtcttgagaagtcagaggtggcctttttaaaatggctggaataaataactgtttgttgtcctagtttttaaagggtcatgttgaatagagatgcctgaggagaggattggagtccccaagtcctgacattgcacaggggaacacctaagaagtgcgcctgttggggctgcaaatgaaggattcccctttcctggccctcctttggttaccactgaatttcataggggcttggggacaacaactcctggcaccctaatctgctgacagttgggttatcaggagacctgttgccctgtctgtctagaactgtctccctttggtgtcactggtgtgactgactaactgtaaacgctggatcaggccttggacaaaatggcaaagtacaaaggttcacctctgctcaggggggtttcagcggctcattttcccttttgtctttaaggcaaactggtgtccactcctctctctatcagggcttactccctgcgctaattgtgatacagagatgtacatgtgaaataactccctgagactctagtggcagcagtttaggcctcagaaggaggccatggagcagagatgggaataggggttgttggtgctgggatatcctcctgcttggccacctcctccctgtggccccatctagctctattgagagctgttgtcatgctcttccgagtttgcagactccgtccagaggtaggtaaagtttaacatgtgggataaaatcatgttttctattttgcgtgcctcacctacccctaaagttctgggggggaggagagaatgacaagaaaggaaaatactcactgatttttctttctcaattcctagagcaagcctggccaactcagtcaggggtgccagagctctttaagacctttttttttccaagtatgtttttaagaaacaggaatgaggaattcacctctcatggaatgcattgacaaagcaaactagaaaaacaaaacttgtagagaccagcttttcttcagtgttatctgttacttcaacaggccagttcaggtcatgttagaacaagtgattagatctgcaaacagtctcattcttaggtgaaaattcagcgatgataatccatggcctgttggtgtcatttggttgaaaagcctgaatccaatcagttgattgatgagcagagtacttgctaaacatttattgtgtatcgagcttgtgttgagttgtgggtaagctggaaggggtcttcatccttgacgacttggctgtaaggtcagtgagatgaagtgcaggctgtgactctgccagcgtgtgtacgttacccacagtgttaacatggtacaagccctaagtactgaggccagtgaggtgcaggctttcccaagaagctggacaagtaaaatttcagggaaattcaatttgccatttggggcacttatagaaacaatccactgtggtctcatgcaagaatgaaatgaagccccgctctgcagacaaggcacccagatatagggcagggcttcaatagctctaactcataactcagaagtaactatggaacattgcttctgtttgaactaaaggtgacccaggaaatgcagagacaatggtttgcatttttaacgggagaaaccattgacaacaaatctttggaaactttagtaaagagtagtatttaccccagaggctatactttttaattcactaacattatacatttaaaaatacttttataattttttccatataaagcttttatttccctggtcctaagtattttctcaaaaaaatttgccatggtgctcatagatatttttaatgctaacatgaaaggctgcacagaccaaacccatgctggctaatgtgcactcatttctgtatgtagtagggaccatttttataccaaaactgtactttgtttttttttctacacagaagtatgagctagggaactgagcaacatgtaaaaattaaatacagcacagtagaatgatctggaaaaatgacaccatagtatgttttggttatctttttccgggcccctggnnnnnnnnnnnnnnnnnnnnnnnnnnnnnnnnnnnnnnnnnnnnnnnnnnnnnnnnnnnnnnnnnnnnnnnnnnnnnnnnnnnnnnnnnnnnnnnnnnnnnnnnnnnnnnnnnnnnnnnnnnnnnnnnnnnnnnnnnnnnnnnnnnnnnnnnnnnnnnnnnnnnnnnnnnnnnnnnnnnnnnnnnnnnnnnnnnnnnnnnnnnnnnnnnnnnnnnnnnnnnnnnnnnnnnnnnnnnnnnnnnnnnnnnnnnnnnnnnnnnnnnnnnnnnnnnnnnnnnnnnnnnnnnnnnnnnnnnnnnnnnnnnnnnnnnnnnnnnnnncccccccccccgccttgggccttgactcttcttaccgcagcacagtagtctcctgtcatccttagggatatattcctagatccccagtagttgcatggagccagccagtattgactcctgctctgtgtttggccccataaatgcatatgcaccaaaggtgtaacttagtgcttgatgcacaacctcaaagcccccgccaatcccctcccctggtgtcgctgcacgcctaggagacttgtagcttttcctcttttcctaccggatagctttcaccttttcacttcagagtgctgggttgggatagttccttggcagggctgagtttccagctttaccactgctttctgtgttttgagatgttattcaatacaatgtgacttgaacccacctgctctttctctgcaggagtcaataagccagacagccaagtggcttccaggtgggaagcctatgccctggggatgagctgagcaaatggacggtcatgttttcagctggatacttcagggcaatctgagatttaatcactgtactcaaaatcttatataaattcaagcttaaagattgcttattcctgaaatttcccaagtacttttaggcctcaggtaattgaaaccatggaaagtagatctcagggtcagtaggagtcagacagctgtgtctacggtctggctcacgcatgcattatgacttcatgtcgtgcatgaaggccactcactgcgacttccatgcttttgcttgctcttccccatcttctccattcacattggcatttctttttccctcacttgatttagtgagcatttgtcactcccacttcattgttctgctactgaacttcctgagagtctggtctgctcttgtttaactccttacctctacttgatcatcttgtgtttataagagccgttagaggccactggtgcctctccacagagacttctactctccctacccaaagctgtctcatgttctgtgaggattctgagaaaacttcatattcatagtcccatacttcatgccctgctctgatcactccttgagccattgcaggctagctccttcccaccactgcactgaaactatatctagtttccaacgcccctgaatgctttgcagtagtttctgattttatcccaaactgatgctcatgctcatgactccctcttccaccgcctttgccattgtttctctcccctcttcccattcctccccactctaccttcctactgctcttcactctctgcttccttgtcctggcctcagccttttccatttattcccctgcactccctgggcttgctacacacctaaggagtcagtcttgatctctgattccttccttccttccttccttccttccttccatccatccatccatccatccatcagagactttcttagagcactctctgcctctcccacagacaaccagaggtcaggtcttggagttgtctctgctcactgaacagccctcccttaggatcaacagcagtgtctactgttacactccaccttctccacagcaggacctgactgtgttcacatttgctctctaataggagcattgctctaaaataaatccctggtccccaaaaaccttgcagtaagtgtgaaattaagtgttctttttttattactgattaatactagtttgcagtagcaagtagcagcacttcatgacaggccctggagaaaataagtctgatacatctacagaccatttaagtcaggtacttgctcctttatttgctcactcaacagaaatgtgcagagaacactgaggcaccaaataggatggagaatttgaccgggcatttttcatctgaggaatcctggcctgtggtgtttctgcctctttttgttcagatttccccatcctaattagtgataaatggtacttagcagatgtctatggaacatttataagaccttctatatgttagcctatttaatcaagacaacagtgtgagtttgttgttgctattactgtcatctaaaaggggtggcatggaaatacgccctaggtcatattgctagtgtgagctagacttgggtttgagtccaggtgttggctccagagcacattggccttggtttcctagttcctcacccaacaacaggctctcccacctacctatttctgatgcgctatctgtggaacatgacaagcaagttcttcatgtgccaaaggtaacctctagttttatctaacaggtgtctggctcgccttgtttttttggatgtttctcctttggggcatgatattggcagtgcactcgtttttccaatctgaaatcagcacttaaggaagaaaaattgcagtaaaatccatctgcttgtgacaggttgctaaatagaattggctctgcagaagtcctgagattcttgagaaatactgagactttgttacaaaagaaattgtccttgttacaggagctcagggtcagcatacacttgcagtcatcttggtgaagagcacgtgtggcttgaggctgagatacctaaagtcctaatgagattatttgtgggctgctatttatgcatgctttcaaaaataaataagaagttttccttctgactctagtgtgtgttatcctgagtttccactgttaaaacttacataattttggactttgggttgctgagagtgaaggaaagccatttacctgcagattttcagtttccaaaggactcatccatgctcatctgttcatctctcctgccttacaacagagtcacgtggttgtcagtacacatcccagtgtttgtgttgcctcctatcttctcatctgacagttctaagcctactcaggaaaaggccagcatggataaataaggtgtttaaatgggtttcattgctgcaaggtacatctaggaaccttgtgtaatgatctcgaggggccctaacagtagcagctggttggtgtaaacaggttagaattcccctttcttgtcagttttatgtttctgtgtactgagtcccgtttctgtctttcactggctgaattcagttcagtctaaatatcacaaaaccatagtttggtgccccaggggtggggagtatcccatgttcatccccacagcattcacaacatcgggaagaggtgttgtgtctagaaggcagggaagcaagcctacgcaatcatgatcaccgcagctgtgctgggataggccatctgctctggtgcaaaccgtggacagatagccaaatagccaagaaagagctgagttgttactgaaagatgtgtcacacagacaaaataatttacaaatagtaggcaggaaatattttcaaaacactaagagagtcccttgagctgaccttgtgggtgttggcttgtttcttgctggactgttcattcattttttttccccctataagagtcattatttcctacaaaaccagaatttgaggtatagcttcagttgaatgtggacaaaaatgataaaaatgtaaaatctaatttaatactaattgtaattatataattctaactaagagaaacttttcaagaaatggaattcttggtgggtgtgatgatgcacacatttaaaccagtacttagaaaaaggcaggtagatctctgtcaggccagctaggctacatagtgagtttcagacaagcagggctacatagtgagacccgggggcggcaagaggatttgcattctgctgtctggttgagcttgtctctaaagtggaagctttagaataccgcagcttgatagaattctgcttataaaccagcccatagaccagcttcttcatgcctgccttttctaaagcattgatgacacaaggcactgggtgtgaacctacaggactccccaggatggcacaacagcctggcaaagggagctggtgttgttgggcaattgtgctctgatttggaagcaccaggctgtgcattctagaatgggtggctactctgactcaaccttagataaatattcctgaattctaagtaagagttcccacccacacacttacttagaattcctgaattctaagaaaaagttcttcactcagttccatggagtgaactgagtttggaaggcagtaagagaacacttggtactaggtactaggtactattcctgtaaccaccccatttcccttaggagtgactcttatctggagtgctactaagctgctgcagaccctagcaagaaccagctcactctgaggggagtggaaacatatgaggagttatagtcttaaacagtgcccactgtccatcgaatactcttagataccacctttatcttgagctgaggcttgaggggttttcagacagatcttcattcattaagtatgtagttatgatcccttctaaaacagtgagaggcagactacacttaagtcattaagtgtgagttactttacatctttggtcttaacaagaagacaattagaagacattggcagatgatgcagcatggggagaaaaaagcatgctatcattctcacactgtggtctggtagaggaccatgccttttccccaccacaattgctcccatgctttgagtaacgtctatttttcatttacctctctcctgtcagagaaatcattcgaggcctttttacagctttgactcttccttaccattcagagaagtcgttctatttcctttgcaagatgaaagcttgtctttgtcctccccaaatagttccaggctgcagaacacccagaatccttgcagataaaagaccttgctgataaaatgctagattgttatcagagatgcaagtgagggagtcaagtccctgccattacttacctccttacagctttgtttatatcctgttcatttggggcatgtttttcttggacagtttcttgtctgtgctctgaactgcagtctgaagtctgtaaacctcccaaaggtcagggagtagtgggttccttcttttcagacaggtttaatggcgaggaagagaagatcaaagtttctatcttccatctggaaagaaagggaccaatgcttggtttgaatggttagttcctcacctcaggtggcaaacgtgtgcgctttggttcagaacacttagccaggaagttgcctggaaatagactggcatttatgtctgaagccaagcagtgatagatagattgggtattcaggcactgaggccaggggccagttaaatcaaaataaaactacctgggaagtcttgacagcatgatctgcacatttaaaaatggctgggctaggcgtggggacatcacagcactcgagagtcaaaggcagatggaactttgagtttgaggccagcctggtctacctactaagttccagagtctcagtggttgcagtcattttcacttagtatttccaccgagtgtgtagtggtagataattcctataaatatattaataactgacaccaccttcactgatggctaacatatatgacattgggttatacaaacatatatgcacacatataatgtcctttgagtttcccaagtaactcagtgtgttagcatcttcacatgtgttcacttactctttctgaagtgtctgttcagagctttgactccatttttattgagttgtttgtttgcttctaaatatattctggattctagggtttttgacatagattaatttatttccctgcatttagaaccagaaaaacaaaattaaattgcagcaagaaagagtctaattataccaaaggaagtacttttcaactgttgtaatactatagtctaagtatgggttcagggacaaacaaaagccatgtaaagcttttcctggggcacttatagcggaagggctggtagtctcttagcagtagtactgcaggtctgttgggacgtgacgcaggttaatcttcctggagacgagtttattgctaacatgtcaatacccttcctgtgtggtaccatttttctaggccaaaatagtgaaactttttggaaggcatttccatgtgcattttgttatttaaagattcattcttcctgattttagttgagtcgttgctaggagataaaaggaaggttacttaggggcgttaatcagcctagcagagcaaactgcaatctctgtagggcaatggccactaaagccatgctccactttctctctttcagcagcaacacttagtattgtgaggcagagtcacttagctctctgtaaggcaaaatcattaaccagactttagagaatccagatgatttagaggtcatggggttgttgtggccttagaaggagcgaggggggctttaatgacagggttccaatagagttaatgaagggcttttctgtgtagaaaacactggtcaattgttttcaagtctgacagaggtccaagcccaggagaactgctctgacttcggttagttctaggcataaaggtttatcatcagcatcaatattgttacgagatcaagctataaaataagtcacgagtgttggaatctttcagaaacataacagattctttgtttgtttgtttggttgtttgttttgttttgttttgtttttgtttttcgagacagggtttctctgtgtagccctggctgtcctggaactcactttgtagaccaggctggcctcgaactcagaaatccacctgccactgcctcccaagtgctgggatcaaaggcgtgcgctgccacgcctggctcaacataaaagattcttgtcataaggggaactaatcaaactgtttacatttaaaagtatttaagctgttatgtggcgtgctcaatgcacaggttatgttaattttattactttggtgcaaaaggaattttagtttcagactaagttttaagtcataattaggctagttaatcaaaataggaactattaccatcaacacaattttgccagtaagtttgtttatccagttgcttaaacattttgacttcaggatttgatgaactcttagagagcactttctgcatcctgctggctgtggaagtacaaaaagatcctggaagaagtagtagttggttggcaagaagtcaggagattaattgcacatgaggcaaaacttttttgccagttttgccaatttatttgactttgaagcactggttgtgtgatacatggtcagggttgttggagaattgggcccttagttgcagtttgcagtacatctcctctccttgctgacgtacttctcagatgtaaggaagggtttcactggaattcagaatgctgtggctggttagcctggcaactgactaccctcagtgatcataactgtttctgtacatgctctgcttgggctctgctttggagcagctttgtgatgcaagcacagagctggagtaccgtatacagtgacactagctaccttatacaatctccttttcatcacagatacactgttttgcacagaataacaaccttatggaggcaaggggcattcacttactgagagctcacctttctaatgtgcatcaaatatcagacaaacgttggatggccatgttgagttctttggcaacttgtcctgtggttgtggctcagtgttggtcatcttaactgtggaaggcgagctgtgcttgttcctcccgtctaaggttatccattcctttgcaagacttagagttgtctgtcactcaccatgtgctcactagcaggctctgactagttcacgcttgacattgagagttttctctactgcttcaccactcacttgtaattctaataagaaaatcactcaaatctgctcttcgtctaacatcaaaagtataaaataaatataaaacaaatataaattaataaggtattagtttttaaaagcaagaaatatgtattaaaatattgtaaaacttatccgcagttattaaaaatgtattgtgcaggggtttgatctctgcattcatgtatacaggcatacataatttagaaaaagaataaaaaataattctttaaaagaatgcatttctctatcacacagcaaattttaatactataaaaccaaaatcacttttgtacttaacctaatcatatcctttaaaataattataatagggctggtgagatggctcagcaggtaagagcaccggactgctcttccgaaggtcccagagttcaaatcccagcaaccacatggtggctcacaaccatccgtaagggagatctgactccctcttctggagtgtctgaagacagctacagtgtacttacatataatcaataaataaatctttaaaaaaaaaatttaaaataattataataggnnnnnnnnnnnnnnnnnnnnnnnnnnnnnnnnnnnnnnnnnnnnnnnnnnnnnnnnnnnnnnnnnnnnnnnnnnnnnnnnnnnnnnnnnnnnnnnnnnnnnnnnnnnnnnnnnnnnnnnnnnnnnnnnnnnnnnnnnnnnnnnnnnnnnnnnnnnnnnnnnnnnnnnnnnnnnnnnnnnnnnnnnnnnnnnnnnnnnnnnnnnnnnnnnnnnnnnnnnnnnnnnnnnnnnnnnnnnnnnnnnnnnnnnnnnnnnnnnnnnnnnnnnnnnnnnnnnnnnnnnnnnnnnnnnnnnnnnnnnnnnnnnnnnnnnnnnnnnnnnnnnnnnnnnnnnnnnnnnnnnnnnnnnnnnnnnnnnnnnnnnnnnnnnnnntttgcggggagggaggattgcatttgtttttattgagtttggtccaatattcttttcttttctttctttgtcttcctccctccctccctccctccctccctccctccctctttcttttcttttcttttcttttcttttcttttcttttcttttcttttcttttcttttctttctcatctttttttacagtctagccattatctccatcccggcccagcctctggctgttccttgagccatagtcctctaagacctagaaagtcattcattgtgagcacagaccattctcccaggttgatgatgcgaggtacaagtgttctaagtcactttgagaattagaactcctggcagtataacaccagcagaaggccagcctgtttagctggcttccacgcctgtccactaccttcgagaaagggagacaccctgagagctggtgctatgtgcagaaccacagtagaatctgcaggcgccttttttagtccctgtagatagagcagggcagttaggaagagctttgcctccgagagggctgtgcagcttatcgtcgtcgtctcaggctgcagaatctgcaccctcggctcttctacaacgctcattccagcctgtgagcccccaaggtagatctggcaatgcttttccagttgttgtaggggagatgccagcaagctggagcccactgaatggcagggtgatagtctgtgttacatctttagatatttagagcacttcatttttcttttgggtaagactgaaaatatttttcctaaatctctaggtctaagggggtccaatatctttgtgtggacatccttccaaagcgttcttcttgacctgggaaagagttcttactaagggaaactgtgtgtcacaactacagagaaaatcttcttcccagctgtctaaaacactactggaatctcagaactttagtttcaaatgttattcattatgggaaaaaaaacaaacaagtggtgaatgattgagatgaaatatcaggtgaactatgaaaattatattttgtctctgtctctgtaagggcagggaatcaggcattagcatttaaaagccatgcatctcttcattattgaagaagtaattctgagtaatgaacgtgcactgtggacataaatactgcacattccctttccatccttctctgggggacttgtacatgccattgcccagcactgtacatgccattgcccagcactgtacatgccattgcccagcactgtacatgccattgcccagcactgtacatgccattgcccagcactgtacatgccattgcccagcactgtacatgccattgcccagcactgtacatgccattgcccagcactgtacatgccattgcccagcactgtacatgccattgcccagcactgtacatgccattgcccagcactgtacatgccattgcccagcactgtacatgccattgcccagcactgtacatgccattgcccagcactgaaaggaatggtgtgcatgcaagcagccatcagccgcggctacctctgcatgcatgtgtctgccacatgcggtggctgggtgctgctgaaggggtgtgcagctgccattttagtttaaaaattagcatctgggtaaggcctagcaaccacgcagcagagtgcgggtgactgcagaatcatgcatctcctaaggcccagccccaagggatcacatcgtccttctctcatgttctgttgtggcttaatagtgtcagcatttcttcatgtggttttgttatgtcagtcacagttaacttacatacaatcaccgatttacctgcagatacatgatatttttgttttgttttgctcatcagacctgacaatgtgcagtttttagcttagcaagtatctacagttcttattcctcactcattaatccgaaggaaggatttttttttttcagtttagctccaaaactccaaaagtcctgattcatttatatttggtatatttgaatggagaaacccgtgacgaactgagtagaggatgtaagtgcagttgttaagtcctagctaccaatgcaagtgggcaggaaaaggccagtgcagttggcaggagatcatttgatgaattagaagcaggtttaggggtctaaagagaacctgttagcctggaccatcactgaatgctttgagaatgtgaagatgacattcacaaatgtatatagattttttttaatttattggatgcaaactttcttttaattatttcttctatacatgcacacatttttctaaaggcaagatttgggacagcattcaatggaaaacatctttgctgtaatagcagtggagtgaaccgtgcatgataaatttgagccctaggcctggagaataaaggtgtgagagcagtcagttggcccagagagactgaagcatcttctctgctgtgcagcttatttggatggagagtgagggtggggctctgtgagcacgtgcaggatgtttggtacaggatggagagtgagggtggggctctgtgagcacgtgcaggatgtttggtacaggcaaggctctgtttcctgttttgacacagagaacactggagacaaacagagaatatacttgctcacagaagctttaagttctcagatgaccctacctgtcagattataataaccggttgccgctcatctggtgggcactgtgttttccgttcgttaccttatttgagctcacagtagccttaaaaggtaagcaaatcttagaaaatctgttgactttccctaagaccctcactagtgagagtacttgaatctacaccaaggcatgctagattccagaacatgctctcaagtctctgttctcagtgtcattcagtattgtagacaaggtagtggccaggggttgccgtgggaagaaagggtaaatgagatgcatcctgcgagcttacacagacagggctgtgcgcttgtaataactgcgaagggatgaaagcaatggctctgaccagaggtagtgcagcaaggttgacaaaagagcacacgccctgttagaattcagatggagagaaataagttatccaatggccccagggtcaaagcacattccaaaggcattccaaatgaagcagcaatgaagagttgtttaatagtgtaacttggaaactattgctcctcccctaggcttcagagggaccctggaaggtagggttgtctcagtcattagtgggcaccattttccaagagcagatagctgagctgtatggaaagcagaccacagttgctggtatttatgagcaagtttagtgaggggaagtcttgggacatagctgaatcacaaagtttattagtgttcaaagtgggatgagaaaccacttctgtggttttctattttaatagtccttggattctattgtttgtttgtttgtttgtttgtttgtttgtttgtttttcaagacagggtttctttgtgtagctttagctgtcctggaactcacgctgtaggccaggctggcctcgaactcacagagatctgcctgcctctgcctcccaaatgctgggattaaaggcgtgcaccaccaccatctagcctaaattttctaacatattcctgtccttgtccccaacaactgtcaaaacaaacctgcaagtgtatttttgcttagtgtttatatgtgtgtatacacatgtacatatatctgtttttaactgtaatctaacttcctgcttatgtaatttatactagaagattgtaaaattacttttgacttgcttcatgatgaatgctattaattaaattttactttataaatttccatctttagcaaatgcattgctttaaaatttttttttaaattgcatctatttattttgtgagtatatatgggtttgggtacatacatgccatagcacatgtgtgaaagtcagttctctctttgcaccaggctggtctgagggaacaagccttagaacttgctctgtagagcaggctagctctacataatgatctcttcctcttaggttgttgggattaaaaccgtggactagcatgacgagtaaacatgcattactgttttaggataattttagttctgtttattaacacaatggtatgaaaggttatgagtttagtaagtacctaaggcaggaaaaaaaaaagtggaagttctgacattgtcctactttcccctgtataaatgccattttggaaaaggtcgagagtagagggagggccattctttagtgtaaggctgctgctaattggaaactaaatatctataatcatttcattgtaattgaaagggaacatttatatataagatcccttttggtaacataaaaccctataacacagggtgtgagttggggctggggacagactaggaagcttcaaaataatagctgtgcaatgtgaaatcatttgctaattgcaaagcattttcaaaatattttctttgttgaatgaacttctgtccctataggccaagacagatattctactgtgtttaccaattacaggttaaatatttaattgttttaaaggaaataagtaagaaactgggtgagttgtcagagccaagttaaaagctgggaaggaactcacaggtaccaactgaagccttggctgcccttcccgtgtgtcccgtctgtgtcgtgtgctgataggctgactgtggtttccactcaatgtctactctttctctcctctgttgccctgtgtcccaatccgccattctgttcatacagaaatgattttgtgtgtgtgtgtgtgtgtgtgtgtgtgtgtgtgtgtgtgagagagagagagagagagagagagagacagagacagagacagagacagagagcgagcgagcgagccgtggtgagtgtgaaagttaagatgacagctttgtggagtttgtgagtttatgagttccaggttactaagcatatgtgaaggtgtcttaactgagccatctctctggctccagaaattacatctggttttattcttctaataaggcacatcctgaaatattataaacatttcttcccatgactacccctctgtctctttcacctccatggccatggccccaacagaccatatacaaattcttcttagcgcactgtttgctgttgaggaaagttaagaggccatctctttgtcaggtagaactcctatcttctgtgcttgccttggcatctaagacagctctgcaatcgagttgcttttctaagtggatgaagtagcatggagtctagagatgtctagtaaagaacttactaagctcagaccttgccagattggtcttcttataatctgtgttgtcttcaaaacctctctcagctttacagtctcactcagcaaaatggtgtggcctctcaggagctaagtgtttacaatgttaggaagccctcagctgcctgccttccctgtgctctgcaaagcatcacaaaatgccacttgtctctggctgtcccttgcttacttcccactctttgcctgagccagcccagtggtgaggatatggagccttggggttcatgtcttgccctcttagaagtaatgttgcctgccatttgtcatgctcctcagtgtggcctcccatcatcctgtcagttctttagccttaatgtcagtacctgagtcatccagaaacatctgcgtgtctcctgagccttcctgcccttgctttatgttctactattgttcttggctctggcaccaactagaaccatgctttcctgcctctctgtctttctcttctccctcttgtagccacaacactaaaatcacttggttaccgttctctctgcacttgagccttggttttgcttcttgtttcaaatgtgcatctcatctttccagacagcatacaggctgcccagagatagtcttgctgttgacgaccacgtaacacagcactttctgcttttcataggcgtccgggtaatatttgttcatcattgagaatcaagtcagttttgctatcacctgttatcttttttccctgtgatagaattatatatgctagtgttatttttagcaaaagcaatgtaaactatgaaacttatacaaatacaaagaaaagcatcatttgaataaagaaaatatatgaacaatcattccaaatgaggtattggtcctgtaaataaacatatgcaagatacagatgttctagcaagcattgaatcatattatgttttattcctacccaggtgtggtcgctcacctatttaccgctcccgggaaatggcagctcgtgcgttggtccccttcattatgatagaccaaataccgagtaccctctgtgctctactgaactcactccccaacagcactgaccagtgtttccgacaaaaccacattcatgggacacttctgcaagtaagtacaacagctctgtgtgacttccatagagcaccacaagatgaacttctgattcttgtgtgttcttagcacgtgaacacttgatacataggcttttaagtttatctgtataacttatttatttctacttcttaacagctatatacctctcaaatattacttcttgcacctcaagtatgaacatacactgatttggcagattatcctgtgcactaaactctgcaacatgctttttcatcaagtattcctatagaacattctggtcattccgtacccaacgttgtgacagtttgaatgagaaatgttacccagagtctcaggtattcaaatgcctgctcctcagttggtggcactgtttgggaaggttgactcacaccatttccagtttaccctctttgcttcccacttgtggttcaagatataaatcgtcaacgtctgttcctgccttctgatgccttcattttgccatcaaggactcttaactctcctgaaccatcagctcacataaactcttctagtcattgccttggtcatagtattttatcaaagcaatagaaaaccaagccttcaggctggcttttgttttaactaaatacgggattttattgttctttttacttaagaataagaatgagaactaattggaactgtcctattaaaaaagacccagtaacctggtaatgggtagtgttggtaagatccgctgatcacatggctgtggggatattcaccttggatggatgggaacggatttagattccatatcatgctgcttgattagaagcagaatgagagttggccctgagctcccaggacatactgtaaacctgaagtctacactactgccatgggggactgtgtgaaatggttcacagtgtgcaattccagagatggactgcctggttctgtatcagatatgcaccctgacccatgatataaacaaacatatgcccgaaggtgaaacgtaaggtagatctgtggtttcgtcttcatggcttggttgtttatatattcagtaaagatttattgaatacctactatatgctattgtgtcatcgtcagaacagtaagtctgacaacatcaagaccagaaagtagacagtcccaatggagcgtgctaggtgacggatgacacatggcagggccatcagtttaaagtggagaaatcagggccagcaccacagggcaggtagcagttaacagaggctgacagtagttaatcaggcatggggaaggagtttcttaggcagagaacatggtagtataaggtggaggggaaggtgccagcctgggaacaggaagttgtgggtcagaccaaagtgccacctcagtggttctcagcactttacccacttgaaattaatgagggtaccgagcaggctttacctttcagtatttacttagacagtagaaatgagagaatatcaagacataagaacccaaagccatactcctttatcaccggggaagacattctcacaatccttaaacgcaataagcttaactgcacatgatgaaggaaaagtaaaggaagccaccatcttagcatcattttaaagtagcttgatcccatggggctcctaaaaagacacacacccacccgccgccggctctcagttcagaactgagtgggcctcagatcctttgtgctttacagctttctgtaattgcttttgttgggaggcgagaagtgttggagttcagagatgtactcccaggcacctaggtggccgtcagagggcagccccagaggtcagtcctcaccttcttccttgtttgagaggctctctgctctgtacaccagggtgctggcctgcaagctttcaggggttcttcccttcgggttgtacctccggatttttacctttggactgggtattcattttaggtcctcatcttgtatggcaagtattttacccacagtaccatatctcccatctcatgtggttcttattataaagccttaagcatttagagcctttgggtcctctcttcattcctatgttaaagagaagaagcacaggttatcctagccttggaaacaggccataaaggcccaaagatcatcattggtttaaataaaacaagttaggtttctttctgtcggtctatctgcctttctttcttgctttctttttttcattttgtttcttttctttctttttctttttcttccttccttccttccttgctttcttgctttcttttttgtaacaaaaaacaatctcatagcatttattgtctcctgataataacacaaggacttctaaaaaatattaataaatctttcagactgtgctagcagaaaacacctttaaaaccactgtactgctttctcaatttctcccatgcttgaccatttctagttggaaacactttcttctatatcatttagtacaaggttcatgtactcgtcaaagccagtagcacaaccctctgtcagcacactgacttgcgcacagagccacacctgaatcaaagacctattttgcaactttctgaagatcaggttgatggggccgtactgccaccttctgtacctcatggccctggtcaagatacactggtgggagtcacagggaccaccacaagagtagaaaggttgcctcagaaatcccaagtcagagctgttggcccccaactctgctgctgtttcaaaggaaacagactagtgacaaggaaaagagcaaaactgagtcttgaaaatgtacactgtgggagttagagtgcccacaacatgaaaggttacagccatgctgctggctgggttctttcagcagtgtaggtaagtggggccattccttcctttctccgcttgtgctggtgggccgcttaggtgcctcctccatggcgggccctggctgttgcaccaaagtgcaagaaaggcttactgggggagggagtcacagtgtgggggctgggtgttcactgtgtggttggacagaccttgtagttcctaaggctacttcacctggtgggaaaggagtcaaaggtgctcgggtccttgggtctgcagtgctgtcagtgagcatctaaagggtggagacaggcagggaggagtcttccttggtagattctttacagagagctgcctttgaagccagcaaatacttgcctttggaaaagagatgctaagagcctgaaaggagtgatactctccacgggaccttcagagccagctaagtaaacacaaaactcttcggttttcgagagcaggaaatcattttgtaatcagaaaacaaattctttcagagaatattttcttgaattatacattgacttctttgaagatgtttacataaacatatcacaccccagagtgtttcttcagtataccttaaagacaaaaatgtgctgacccttgagtttctggctctgggaaagattcaaattatagggtgtgcataactgggacttgtgagttcctttcctgatcatccagagccagaggctcagcgtgacagtgctgaggtgggtggaagtgatgcatgctgggaaggtgagatatagttcagcaggttctgaagagcccaaggtaaccacaggaagtctcagtggaggcagcagagccatggagcttacagtgatcactcagagcaacactggcaggtccacccctctgtgaagtagagtgaactgttttactgccacagctcttcatgttaggaacttaatgttattactaggtcacttgcccctcctaagagctggcagtgccattcagaaagttctcttgttgagaccaagtttggccaacaactccaaggaaagctttgttctgattcttacgtatttaactaacattttgatatttcataaagaagtgtacagcatctgaggggagagtttgaattttgggtttgttcatccaccacgtcttttactcaagtttctgatggtataatatcaaatataaaaggtaaaagaaagcttgttcataaagctcgcagttagatggagcttgttgggcgtgagaaaaccatttgtgtatttatttgaatggtctagacaagttttgtcttcaatctaaacaatcactctggtgccaccgcacctcggtgtgagagacaagcaagctgcgcttccctagtaattgacatcaactttgcttttctgttcagttctttttttctccccgatttggagacttgatttctccatcttgagaattctgagttctaagagaaagggaaagagagagagatgtctttcctatccatggagctcagaggcggggctgcctgcttgtacagtacagtgtattaaccatacatagatgactttggatggcctaggacgtcagcctagtttaccatggaagtaaaggtaacctttgattttattcatgctcaagcattcaagcctgcaaagtagcaagactagagcccttcagtcatccactcccttcccagtcannnnnnnnnnnnnnnnnnnnagacaagcaagctgcgcttccctagtaattgacatcaactttgcttttctgttcagttctttttttctccccgatttggagacttgatttctccatcttgagaattctgagttctaagagaaagggaaagagagagagatgtctttcctatccatggagctcagaggcggggctgcctgcttgtacagtacagtgtattaaccatacatagatgactttggatggcctaggacgtcagcctagtttaccatggaagtaaaggtaacctttgattttattcatgctcaagcattcaagcctgcaaagtagcaagactagagcccttcagtcatccactcccttcccagtcaaagggagaggtgtacttcactctaaagcccatggctctttttataatgtgcttcctccctgcagttgacaagagtaacagctttcatgactagggtagttaagccaagagtccatctcttttcttatgttacctgttactggttgattggtctccttacattgagcgtgttgtaattggtcaacattggaacagagtccgccagcgttagagattgtgtggatcgttactaaaggtcagggactaacatggaaaagactcatcggaccttccctgcctccactcctctctctcccccttctctttgtttttctgcataagtctccttgctggaacaccagggttttctccaactgctcagtcacagtgctcacaccctctcttcctgagccttggacttgagcagttctggatctaggaagtggtgaggctgcaaggacatggtgacgactgagtttaactcagcaaacacagtgtgcctgccctgctctagaggtgctggaagtcaggggagtagtttgccccgtggggttttttctcccaatgttgaggggctggggtttgaggtccaaagcacactaagctctctgtgggcaggggcagcggggtgagtaaagctggggtgaaaaacagacagccagatgactgtggacttgaaagaagaaaaaaatgaggtggtctctgcttgagtcaggatctcgcaaagatgggagcagcggagtgggactgggtcatcaagaacagcttgagaactgaaggcacagggtgatcgcgaatggctctctagaaaaggaaagcagaaacctagggagcagtaaaggtgaaccagtttgcctaagtgtgtaacgcagctgctggtcaggggctgggaccagacaccatccttcattgctttccctagaccccggcaatagaaggaaggaaaaagtccaggagacagacagctttgcccgagtacttacaattaaatataatttaagagttatttccatcttttaaaagcatgcgcattgtagtcattctttgctttaagaattttaatatattttcttatttccatatttctcaacagtacaaaattgtgaaatataaaatgttcaagttgtccagaaatggcacagtacttgacaggtcctgtttgatgatctgtgttcgttgttgatgattttatgctcagaaagtacaatttcagacggaaaaacaaaagcctgaagtgatggtgacttcaaagctgagtggattacttgtctgtgtggtttgtttccagaccgactcagacattactggaaacactcttatttgtgactggtagtcaggtttgctcttccctcttgtggacctgtggtccctggaaaggagaatctgcatctgacaaagttgctccccagtctgggaagggctgtggccaagtttctcccatggtgtgattgtaatgtgtcaacatctctgcagagcctgcagttctcagacagcaggagtatggcagggagagctggagactgcgggcaggcaccaagctgggaggagaggcatctctgttaacgcaggggcagcagagcagtgacttactattgccttgatatgaacagcactgggggggggggggggcactgggctcttcttaaaagttaaagaaagacctagaccttgttaaaatgtacgttggcaatatatattcacttttaattaaaatcctacttccagggataaattaatcctttccttataaacattcaaaagcttttgtttggtgtgtgttacttagagaacctctccaagtgttggctccagagcacaggctgccatacatgattactgttgcccagcatgccctcccatggctttgcagtgttctgaaagaaggctggctaagtcagggctatgttgaacttacagaagagtcacttcatgtttctccaggggtgagaatggggccaggaatggtgaaaagtaaggagtaggcctctattccccctggctgctgagtaggatacagctattgaatgacctaccaattattgtgtaactacagaggtccttctggaaggttatgttattcctggcctactgataagaagaaaaaaaatgagactgagagagtttgagatattcctaaagttatacaaattataaatggtggcaaatagatcagggttttacttctaggctcatgtgaagcttttgagctgtgctcttaacttacagtctgagactgtatgtactatgctgtatacactgtactccagtgtgtgagtgtgtgtgtgtgtgtgtgtgtgtgtgtgtgtgtttgccactgttatactgtactatagaatactacttctgtgaatgaggaaaagaaagttctcagaaaaaccagtcactgtggggacttcagggtcccactagggaaactggcattgttgggttattcaagcactattgattagtgccagctttgtgttaagttgacacatcaaagaaaagagagatccttgctcaggagcattaactctcggggatgggggtgtagctgagttggcagagtgctttcctagcatgctcagagcactgaatatctcagcacatggaagctagagacaggaggataagttcagggtcatcttagctacatagtgagttcaaagctaacgtgggctacatgtgaccctgtctcaaaatccaacaaaaacaaaaagatcagctttcatggagctaatattcttatagcagggcagtagtgggggaagtaaaataatagataatagcatactactataacttacagtccataatgtaggtgaattatgtatgttcttggaagctactaattgctttggccctaaagatcagacagaatagaggagtcagagtaatgggagcaaatagtgaagggtcagaatagtcactgttggagggatagtgtttgaaactggagggggtctagaaagtgaatatgttttcttctcaaattgcacgggtcacataggtttgtaagcaggtatgccagatatgtgtcagaaactatcttttccatagacaaggaccaacaaagtggacttaatggatgaacaagactagaaaggacgccctattttagaagcacctaaaatgaattccctctgggatcagagtcaggcttgtctcggatccggaaaagaacagtgactgttgtaccacttcctctgtcctcctgcgaggcctttcacgtgctgcctgtacctgggcttgtgaggtagatggagagtgaagtggggaatagctctgcttttacttagtgaatttttattgagtagtttttaagtataaaccgttgtgctaggtaccatggaaaatacaaagaaaagtttatttataacatggcccccaccctcaagaagctgtgatcttccctgaaaaagaagctgtcaactttgcaagctacacagcagaagttatgtggcagcatatgatatgtgccaaaggaatgccatagtcaccatctgaggtgaggcgggatgggttggagtgagggcgaagacgtcagaaactttggggcttagggtaaaccagcgtaagacaccatttgcatggggaccatgtgcttggcctcgaggagatgaagataggagggaaggtatttgtcagcatgtgaaacactaaaaatgatacaagcctttgagcttaaaaaaaaaaaaaaaaaaaaaaagctgttttaagccaggtgtggtggtgcacgcctttaatcccagcacttgggaggcagaggcaggcgatttctgagttcgaggccagcctggtctacagagtgagttccaggacagccagggctacacagagaaaccctgtctcgaaaaaccaaagagagagagagagagagagagagagagagagcgagagagcgctgttttaggaaaattaatgtacattgaaacaacagtagatcatgtgatgcttcctactagcctgctgagagtgcacctgagagtgtgtcagttctgagagtgcacctgagagtgagtcagttgtgagagtgcacctgagagtgtgtcagttctgagagtgcacctgagagtgtgtcagttgtgagagtgcacctgagagtgtgtcagttctgagagtgcacctgagagtgtgtcagttgtgagagtgcacctgagagtgagtcagttgtgagagtgcacctgagagtgtgtcagttctgagagtgcacctgagagtgtgtcagttgtgagagtgcacctgagagtgtgtcagttctgagagtgcacctgagagtgtgtcagttctgagagtgcacctgagagtgtgtcagttctgagagtgcacctgagagtgtgtcagttctgagagtgcacctgagagtgtgtcagttctgagagtgcacctgagagtgtgtcagttgtgagagtgcacctgagagtgagtcagttgtgagagtgcacctgagagtgtgtcagttgtgagagtgcacctgagagtgtgtcagttctgagagtgcacctgagagtgagtcagttgtgagagtgcacctgagagtgtgtcagttctgagagtgcacctgagagtgtgtcagttgtgagagtgcacctgagagtgagtcagttgtgagagtgcatctgagagtgtgtcagttgtgagagtgcacctgagagtgagtcagttgtgagagtgcacctgagagtgtgtcagttgtgagagtgcacctgagagtgagtcagttctgagagtgcacctgagagtgagtcagttctgagagtgcacctgagagtgtgtcagttctgagagtgcacctgagagtgagtcagttgtgagagtgcacctgagagtgagtcagttgtgagagtgcacctgagagtgtgtcagttgtgagagtgcacctgagagtgagtcagttgtgagttgctgctacacagagtgcacctgagagtgtgtcagtggtgagagtgcacctgagagagtgtcagttgtgagttggtgctacacagagggtcctttagtcagccccgccctcacaggagccagggtccctcccgaaggttccccaggagagatcctgcctatcagctccctatcctgcgcacctggtttgtttggaattacatcctttccctcagactccatcagaaactcaatgaatctagaagagaacactgttacactgtctcacacaaagaactctttgaccattccaaggggagagtttgaagttcataaagtgaaaggagacacaggatccacccagatagaataatctcttacttttgcaaggtcatttttcatctccatcttgccagctcctcccagtccttccattgttattgttttgagacatttcattactcaagataattctgagtatacttcagaaatctatcagaacaaaggagcacactgtctacagtctggagctgtcgtttcctagtattcttatcaagtagctcgtaatatatgggcccattatttgatggacatttgggggtgtttcctatccaataaaaatattatttattgcct

SEQ ID NO: 237 - DNA, 2506 bp, Mus musculus
gtgcggatagatacactaggcttgctttgtgaaagtaatcggagtacagaagtggtctctacagaagaaatgcagtgggttcagttttttatcacttacaacctcaacagccagtctccaggggtgcgccagcagatttgctcactccttaaaaagttgttttgcaggatacaagaaagttcacaggtactttataaattggaacagagaaaatctacacctgactcagagaacgggtccatcagagagcagccttctgtcactttacagcagtataagaatttcatgtcgtctgtttgcaacattctctttgaagcattgtttcctgggtcttcctactcgactagattttcagctttaactatcttaggatcagtagctgaagtgtttcctgatccagaaggtaacatccaaacagtgtatcagctgagtcatgatattgatgctggccgttaccaaatacttatggagtgtttcactagtacttttgaagaagtgaaaaccttagcatttgatcttctgatgaagctgtcgtcagtaacagctggacagttccaggattctgagaagctgcaagacctgttccaggcagcgctggaactcagcactagcaccaagccttatgattgtgtgacagcctcctacctgctgaacttgctgatacggcaggatgctctgccagccgtcctgtctgcctcttccccacagcagctcacacgtggagcaggagagacgtctgctgtgctggaaaggaacacattagtggttattaaatgcttgatggaaaaccttgaggatgaaatatctcaagctgagaactctctgcttcaggctgcgtcttcatttccaatgtatgggagagtccactgtataacaagagcttttcagaggttgcctctaaatgacctgcggctggcgagcgagtggaggccactgctggggaggcttctgctgctgtcctacaggctttccactgtggtggcccctgtcatccagagctcctctcctgaaggcctcatccctgtggacactgactcagcgtcagcaagccgcttgcagctcattctcaatgagatccagccacgggatactaacgattacttcaaccacaccaaaatactgaaagaatgtgatagctttgatttggaggacttgagtaccagtgtctcaaatattgatagttctgcagaagttaaaggtaaagaagaaaaagcgtgtgacgtaactgctcagatggtcctcgcgtgctgctggaggagcatgaaggaagtggctttgcttctcggcacgctctgccagcttctccctgtgcagcctgggccagaatcttctaatgtgttcctaacagtgcagcaggttaaagaaataggagattactttaaacaacaccttttgcagtccagacacagaggagcatttgaactggcttatactggttttgtgaaactcactgaaatattgaacaggtgctctaatgtgagtctgcaaaagctgccagagcagtggctgcggagcgttctggaggaaattaaaggcagtgatccctcatccaaactttgtgctacaaggcgcagtgctgggattcccttctacatacaggcattgttggcatctgaaccaaagaagagtagaatggacttgctgaaaataacaatgagggagctgatctccttggctttgtctgcagatgactcaaagggcagagtccctcaggttcatgctttaaacattctccgagccttgttcagagacacccgtctgggagaaaacattatcccctatgttgctggtggagctaaggctgcaattctgggctttacatcccctgtctgggcagtgagaaattcatccacacttctctttagttccttgatcacaagagtttttggcgttaagagaggaaaggatgaagtttccaaaacaaatagtgaactgggagagcctgatcgccaccctggcatgttcctcttactcctggtgttggagagactgtacccatcgccgatggacggcacatcatctgcgctcagcttggccccttttgttcctttcattatcaggaacactggagacaaacagagaatatacttgctcacagaagctttaagttctcagatgaccctacctgtcagattataataaccggttgccgctcatctggtgggcactgtgttttccgttcgttaccttatttgagctcacagtagccttaaaaggtgtggtcgctcacctatttaccgctcccgggaaatggcagctcgtgcgttggtccccttcattatgatagaccaaataccgagtaccctctgtgctctactgaactcactccccaacagcactgaccagtgtttccgacaaaaccacattcatgggacacttctgcaactatatacctctcaaatattacttcttgcacctcaagtatgaacatacactgatttggcagattatcctgtgcactaaactctgcaacatgctttttcatcaagtattcctatagaacatt

SEQ ID NO: 238 - protein, 710 aa, Mus musculus
VRIDTLGLLCESNRSTEVVSTEEMQWVQFFITYNLNSQSPGVRQQICSLLKKLFCRIQESSQVLYKLEQRKSTPDSENGSIREQPSVTLQQYKNFMSSVCNILFEALFPGSSYSTRFSALTILGSVAEVFPDPEGNIQTVYQLSHDIDAGRYQILMECFTSTFEEVKTLAFDLLMKLSSVTAGQFQDSEKLQDLFQAALELSTSTKPYDCVTASYLLNLLIRQDALPAVLSASSPQQLTRGAGETSAVLERNTLVVIKCLMENLEDEISQAENSLLQAASSFPMYGRVHCITRAFQRLPLNDLRLASEWRPLLGRLLLLSYRLSTVVAPVIQSSSPEGLIPVDTDSASASRLQLILNEIQPRDTNDYFNHTKILKECDSFDLEDLSTSVSNIDSSAEVKGKEEKACDVTAQMVLACCWRSMKEVLLGTLCQLLPVQPGPESSNVFLTVQQVKEIGDYFKQHLLQSRHRGAFELAYTGFVKLTEILNRCSNVSLQKLPEQWLRSVLEEIKGSDPSSKLCATRRSAGIPFYIQALLASEPKKSRMDLLKITMRELISLALSADDSKGRVPQVHALNILRALFRDTRLGENIIPYVAGGAKAAILGFTSPVWAVRNSSTLLFSSLITRVFGVKRGKDEVSKTNSELGEPDRHPGMFLLLLVLERLYPSPMDGTSSALSLAPFVPFIIRNTGDKQRIYLLTEALSSQMTLPVRL

SEQ ID NO: 239 - DNA, 100864 bp, Mus musculus
  misc_feature (1)...(100864): n = A,T,C or G
ttttcctgacctgttttcaagtaccactgggcataggactcaaaggataagtccaggagccaggtggtgacatttcccaccccagtactcagggccctgaggcaggagggcaggaggaactcaagttcaaggtcagcctagctacatagtgagtttgagccacgtggacgaagacagaaggtaaagagtgggagcaggatctgactgctgcactctgtaggatgtctgcagagcctcctgttctgagcagttgagatatgttcgttttctttgattttttttttaatctcttggtaaaaaaaaaataccacatggctatctgtcttagtaattagcattctggggtctctctctctctctctctctctctctcctcttctctctcttctcctctccctccctccctccttcccttcccctctcccccccggtatatcttgaagtcattggtttgataggccaacagtactgtctcttgattctgcagatctaaccctgggatcaggtgacctccatacactctgcacatataaaatgctaacctcttggttaaggtgacgagcactgttgctgtgtgaattttctgggggttgttttctttggctgatttttttgaggcccaggctggcctcatacttgtagctgaagatacccttaagatcctaatctcctgcctctacctccaaaaggattacaaacatgagcttgtacactcagataaagtttccacgtttgattatgtaaattgttagtattggaggaaacttggcagaaggcatgcaggccacatttaacaaactaaatgggtttataattattttaaaagaaaaaacagtggtggcatgttcttttaataccagtactcaggaagcagagacagggctagcctggtctacagattaagttcctatacagccaaggctacatagagaaaccctgtcccaaaaaaataaaataaatacatagattagattagatagcagaaatctaccatattaaatgtaaaatcccaggctccactactgataatttgacaggaataaaaatatgatcatagcatttatagcttcttttttaatttagcagtatgacttagagctgtttcaattaagtacgtgtaaacccacagttcttcttaacagctgtatagtttggctatgactactcacagaaatatccacagcttctccagctggttctgtgtcagtaatttcaaattgttcactttacaatcaatatcattcttgaacatggatatctggaagtgtggctgcaaaataaacacctagaaacacctaggacattgtgagaatggagaaagtgcatgttttccattttgaaagcttttggagttgttttgcctagctcctgttgtgaggtataataagtttgtttgtttgtttggttggttggttggttttggttttttcgagacagggtttctctgtagaccaggctggcctcgaactcagaaatccgcctgcctctgcctcacaagcgctgggattaaaggcgtgagccaccaccgcccggcaaggtataataggttatatgtgcaaaaacgtggctctgccagtaagtttctaactcactgatgaattcatgtttattttcttagttatcaattgggttttaccctttcaaaaaatttctttgtcaaattactttggcttaaaaatagattgtttaaggtccaagaggtagacaatggtaagaggggacgtgatgagtgagagcagggtggaaagacatggcatagcccttgagcctcctgtttccattaaacattgtgtctgtgtgtcctttaacgtaatggcattaacattttctcatatgtattggctatttctatttcatctgtacattatttatattctttgctaaatatttgcagctcccaaagtggtgggccaaggcgtaggatgttttaaaactgagggagaaagtactgtgatgctggacctctgtcaggcgtgtgaactaccagctcaaagtagaatttgagatattagctctcgccatgtctttgtaagattgacatgggtagctgctgtgatagaaagtatgtgtcataagaactaaggtggaacagcaaggagaggagcgcagggcgtgggacatggtagacacatacatcccattagtggccctgtgagaaggcagtcagatgcagaagccctgaaagactttgtgttccttgggtcgtttgaacctacccacctaatgaattcaaagcattagatatgtccattggtctagaggccaccataaaaaaattatggcagttctaatgatgcataaattagggaggtttagaaatctaacctccactccctctctttgagacagtctcattgtgaagttctggctaacctctaactcagacacctgcctgcctctgcttcctaagtgcatatttaatttaattattttcatttttgttaatgagagatgaattaacaaatactttatcctatttttcttttatagttttgcatttttggttttggggggtttgtattgtcctccatacaataggtagggatccaactaatgtatatcacaaagacctggttggttgttttctattattttattgaataagtcattcttattgtagagatctgcctgccctgcctgctaagtgctttctcctttcccctcgctttcaggtataaacaggtaatataagactctttagtggtgtcgcttgactttagcagtgactcattcttgattaattttatttcatttatgctaccaccaacatacctctccctgtgtctcaactgaacaaattatctgttatttttatgggttagttctgtttggttggttgctatttgttttgttagttttcatgggtatgagtgttttgcctgcatgtatgtatatgcaccacaggcataactggtaccaagaagaccagaaaagagcacaagatcttcttgaggatgacccagctaaggaactcaagtgtcattaagatattgcctagagcccacactcctctaaggtctgtgacaggtgttactggcaataagagccccttcattggactctacaaatggcataggcaaatacatgtgcccaccaagcccaaacaataagaagggttctcctgagaaactggtctacctgaggcttcagtcagtatgcctgaagcagaaaaccaatcctgcaacctggccaaccttaaagtgactggaaatgacagatgttactgggctttctccctggctttcccaagacacaggcacatgcacgcacacaaatgcatgcatgcacacgtatgcggtctgcctttgaagtgtttgctatctccacttccagcaattatgtgaagaggagtgtttctgtgaattcaaaagtttagattcttttctcaaccattcccctactaccccctttttcagtctgacttcaagccataaagtacttcagcttgccggcctgtctttagttctgtttgtatgaattaagttgacagaataaatactcacattcccactacaggctgaacagtgtttgcctgtgtgaccagtgagttgagaaaagggggaggagccgacgtcactcgatagatgctatacattcccggcatagatcatttattaagtccgtaaaaataatgcaggtgttttaacagccgaaataaaatcctgtgtaaacataaagtttggaaaaatgtggcagtgacttagctggggttagagtaatgcaggaaggcagatgcaggtggcatactggcctgagtggagtgggcgcaaagtgctcgccaagtctgtatgctgcaggggaaaggctggacttactttgttttgttttgttttactctttagcagaatccagttgtaaaagtgaatggactggcattgatcattagagtttaggatcactgatgggtttgtccactcacccctttaggtctgacctttgagatgactatcctttgtcctactggagttggccttttccatggcctgcctaaccctgcctatgactgctcaagcctgctggcttctgagctcagctgctgttgattttaaagggaggaaactggtctgaaagccacactctgtgaaggagaagcccgtctcagcattgctttcccaaacagccgtatatcatcttgatcttgtctcacacaagtcactattttagtaaagccgcataagccagacatactttactgaggcagtaagagtttttcagggcagtgcctcatgactcttcttagccgcatgacatttattccgcatgcattacattcatactgtagagctgcttttattaagatcctgggctgcccaaatggaccacatgcttcccacagatgcctgctcacctccatcccccagggtctctctgggtttagagtctgggtagagggtgaccctgtgtccaggttctcaatgtggtgcctcattacaacttactttttcattgtaagaaatacaggatcccctgaccttcattcagtacagccccttcatggactcctctttagggcagggctaaccagccttggttgggacagtcagggcatgctgcagccaactgtgatccattctgcctctttctgatggaagcagagtctttgtaactgttctttctctctgcctgcctgcctgcctgcctgcctgcctgcctgcctgcctgcctgcctgcctgcctgcctgcctgcctgcctgccttcgttccttccttccgttgttgttgttgttgttgttgttgttgttgttgttgttgttgttgttgcagttgcatgtatatgtgatgttagggggctggggtaccatggtattcatgtgaaggtcagagaataacttcacggagtcacttctgtccttccactgtggcctggggtctgaacttaccttccctggttggtgtaataagggtctctgccagctgagccgtgaggcagtggagccatcaagtagctgaactgtcaggcatggctctcatgcagcagcaacgctttcgtcctctcttttctttccttgctgagtccactttagggatctgctgtgcctagaggcaaactatcctctgctctaaggttaatagatacacagagcgctgtctcggtctcaaaagatttgctgttttgtgcagtaaatgactgactaaagaaaccatcacatagatgctccctaccccacatctcagtaaatgagatgagaatccagactgatgcagtccccgcccaccactctcagacggctggggctgcccttctgatcatgatcctaaggtagcccagcttcccaagttaacaatatctttttgatgtccaacttcttttttccagctgtcaccctacttggcagcccaagaagggctttcccacgtaagtgttcctctctactcaccacactagagttcagctgtggttcttagagggtaccacaagatcagagtgtgtcctggtcagaaacctagaggagtcactcacactcatgccctctctgcctaccctttgatgtcacacctttcatacattcttgtactttgtaaatatttcattttggttttgatgtcccaaagttgagaaaaatgagcagtgacaaatggcattaatatgcccttagcagtagtgagcagtaagtagctcctcccattcagctatgaatgggtcacttgtgacttgttaggtccactacaagtggaccttctgagtttcaaaagaagttgaaaatagggatgatgctgatatgatgccccccagcttctaaatgtttttacagaagcactcatagcccacgtgctaatagtctttagcccctggttcaacacatcacctcttaactggacttctggcatgatcctggaccccctgtcttatctgaagcagcccttgatatctccctgcaagttacagctcccatccccgcagtctttcctttgaagagggctctgctggccacatgacaggatcaattccatcacattgccagtgaggtcttcctcatcctgacccacacaccatgctgatctctgaccagtcccagtacattttttaaattaggatctactttaagacaatggtagatttatgaaaatattgtgttggtagtacaaagattcccatgtatattcctttcctctcccctaactttctcctactattagtgtttttattagtgtggttcattgttaaaattagccaaccaccattgaatagtaaacaccttttaaagatttttttttaattgtatgtagatatgtgagtgcacatgtgtccatatgtgtgtgtgtgtgtgtgtgtgtgtatgtaataaacattatatatctctctagtcacagattgcagagatctctctgttcccattagctcctcctgaaggctcaatcactgtcagttgcagtctaaagatattaaagttcaaactggttgtgctggcacttgcctttaaattcagccctgtggaggcagaggcagggacatctctgagtttgaggccagcctggcctatagagtaagtcccagagaaaccctgtctcaaaaatccaaaaaaaaggggggggggagttccaaaattgaagtaaataaatttaagtaatttttattatagtatattgttgttttctgttttatttcgcttttgttgtgattagtttgaaagttaaactttttatagatgtgtatatgtatagaggaaaaatacacttacgtaaggtttatattaaccaaggtttcaggtacccaccagtgccttggaatgtgtcctacagagagggccactgagctgacaatatgattcagccaagccaggaaaaagtacttgtcatgcgagtttaacaatttaagttccatcactagaactgatccccaaaatatgttccttgacctctacacatgtgccatcacacacacactagaataataattgaaaagacggaggagactactgtcttactctatttaacatgaggaaacagaggttaacttggttgatctaaagatatacataggtagtcccttggtttacaaccatgtttgccctcagagtgtgtaccatgtgattggagtcttactatttgtctaaccttgcagtctccatcacatcaggagtcaagggaatagaggagaaaggtatcttccagccacgtgtcagccctgaacacaaaggtggtacctacctaagtgtacaggctccaggcgggactgtatcctgagacagctcctgtcagtagagacactaaaccccagcatatggtcggtccactcagtgctgctgagctcctaccatgtactggactcacaaacagcagatcatgggaagccaggcaggtgatgtcagtggcatgcagcatcagggaggctgctgggttctcacatctctaatcctcatgactagaacccaaactgggggagcaggagaaagaggcaggagggagggagcagccctgctgcttggtctctgctgcagttaccagggcactatctggtaataacacttgcttaataagtatttgtggactggatatttgaatgctgttgtacacttgggcccctaaactggcagtatgcttgtcagcactttggtgtgtctgatgagtcctgctccttcactggcctggcagctcaaacttctctatgattactgtttgcaagtcatcccaggcctgggtttaaccacactcagtaccagcactgtaggcaaatgcggaaggagagaaaagtggccttgtgtctgccaacccaagaaccgagagacaagtggctctttccatccagacctccctgagcgtcacactcaatgattatctcatttgtcttgagtccttcaaatgtcatgtgaggatggttgtgcattcaaatcttttcattaatatttctcagaaatactaatctatttcatgtttgtttgcaagcctctccatctgctttgtctcctttccttccctgctctgttctcctctgcttctctaacaagtgctcggctcggtttgtactgcactgcctcttatacttgcttatgtctaccaggtttgcctacatgcccctctgtgtacattggtcaggtacagacatatcactctctgtccttggtgagttactgggattgcagttgttgtctggtgtgtgcccagggtgacagaattgatgggcctgtaggctgacattcataagccagaactaccaagcatttcaaaaacagtcttgtttttgccaagcaaggtgagcaaatccaggccagggcttaaacatccacagggggttatttctaaagtgattgcttctaaatgagaagcatttgaaacctcacagctctcttgacaagtaaattccacagccgtgtgttttgctggtgtctgctgattaattacagcgctgtgacacatgaaagccctggtggttggtttagtgcagctgtggagaaaagaaagcaaggcctagtgactttgccagctcttttgggacagtggggattgagaccaagggaggtatttttccctctggcagtcaccgcataggaacagaagccccggccagcccagttctccaggctctatgccgggtggtttggtccctgcaggctgtggtgaggcagcatctgatctgtgctcctgaaagagcaggtcctttgttagaaaaagcgcttcagtgtgcatacaggggctgggcccacactcccatagactcacccttccaagaaacagtagactaggcatggtgacatacacctgtaattccagtattcaggaggcaggaggatcaactggttcaaggccatccttagctacattgggagtttgagaccaccctgggctacttgagttcttatctaaaaaagggcagagcagggagagaatcttgacctgtgactccagctgtagtcccaaggcacatgtgtaaatgcccaagaatataaaggggcctcttcagcagttgactctggaatactcccacagtaacatcttcatggcaaagcagggaagaaggtctgaaagaatttgctctgacaggtgactaccatgaccctaaatgggttcatctgagcattcagttgacctgtgtagacaaacagcaagaggcccttatagcttgcttttttcacttggcaatgtaaaaatatttgctattattatcacttaagactgaggcacagcctgggaggtggtaccataagtaaagtacttgcacttatcccaagagcccacataaagccacatgtggcagcttgtgtgccagccctgctggcagaggatacaacagaaaagaaaagggaaaacattttaaatttcttatgtgtttattggcactttgtttccttcatccttatatgcttatgtaggtgaccaaccaaacaaaggaattgtgtgccattgaggctttcaggccagagaaccctctgtctcattcattgttccccaaagatctgtgctcctcacaggggcacagtggtctagattgtgtggccaaacagtgccaccatcatacatataaacacttgagagacatcaggctctgatctttctgcttttaattcctggtatataactgtcatgtaagtgtcaagtgtatgccacatctgactgctgtcccttctgactgctaaggaaaagtttcagagatttgtttacagacagtactgcctgcttctacacaggtgtgttgtgctgttcctatctcattggcccacactgccttatgaacccaagtatatgtctaagccacacagactcatagttccttcctgtgcagacttggagtgtagtttcttgtaagattgctgacataaaggtaattccacttcttgtttctacctaagaagctctcgaggctgatgattatgtggtcacggtgatccttggtctagggaattgtgggagtgacccagagcatgggtttgtgtggcccaaccctgggctgcccccagccccccagcctgttttcttgtggagacagagttcgtttcctttgaggaaccattttgaagaaatctcattttcacagccaagtattgtttttcctcttttctggttcaggtttttcatctgttacaagcctacattacagactgcagacacagaacaaatgcagatttcctgcaagagctgagtgatgtcactgcttgtaccaaagccaaactctggctggccatgaggtatgtaaaagcccacgtgaatgaggagacagcactgggtgagtggtgttagagggttgctctttcaagttgtgaggaggtttcagtcgtttccagactttttggagtattttagacctttgcattgtggtgaaaaagtatttcttgacaatttttctaaaattgctaagcgttggtgctaggagtttaatatatttcaatagtcagatgttgcttaccctcgccaagaccccaacactgttagctggtctgcattgtacaaacccttgggtgcttgaaggcactgaagagaaggtagaacatgcatggaagagggaactgaagtttgccaggattcgatgggtagtcggcttatgtcagcaaaagtggaggggaccttttttatttttttttcatttttttcttttctttatttctttctttctttttcttttttttctttctttcttttttttttctttctgttttgccagtcttacatgtgcttgttctggaacttagaatataaagtgatgtgaagagtaaaaacaaccttccattttatcatgtgtagagaaaactcttaacactgtgtgcaaaatctttggatccccagatattggtagaacagtgtctcttcaaggctcctgtaggagttaactttagcaaaggtagttaagaagaggccagttgtgggcagtggtgcgtgcctttaatcacaacactcaagagacaggcaggcggatctctataaatttgaagctagcctagcctgcaaagtgattccaggacagccagggctttcttatacagagaaacctgtctggggggttgggggggagagaaagaagaggccagtagtacttaagacagccctgtgaaatgatgccataaccctccatgaggtagaggaaactgggcaggtcacactgaaagtgtggcgagccactggtggctgtccaccacggcgggtgtggtgatagggtgtgtagtgactgtctcaggccatacttaactgtgggcgtgctcactggttgggtcctctttgtctaaagtgccactgaggttatggaagctgctcagtggtttccctaagtgtgagattgcttgccttctgtgtagcccattgccttcagcctccctaagacacacttccagagaacagaggcctggggtcgcatttgtgccttgtctttacagatcttccagctgttgttctggggtcaggaaatggaggctctccaagaattgtctgctgaaaatcatttttagccataccctcgtcgggagttaagccgtggctctgaagcttgtatagggaagagtctctgtcccttttgctcaggcgcaccagaagtccttaggccattccttcttggtgcatgagaaagaagatggagggacaggccagactttgacgggcacagtttgttcagtgcctggaggtggctgagaagtcttagttctacacagccactcttcagctggagagggtcttcctaccttggcagacatcctccatggtccctgtcactgttgtccaatcaaccttgtcattgtgagcatccctccacccccttctgaggttttttcctctgatttctttagccttagcctagaaaatacagccctgagtcacatgagctcactgggttctgcctccttgcccagagcacaggaaagccacagttgtgcttcctacagtcagctctcttatccaagtgtgaacttcccactcagtaggtggctcctaatgccaggcctcctcttgctccccaacatacggtttttacaagtattaatcagggtgtgttcgagcctagggtagagtttgggaggaaatcgtgctgcagaagctgaggatattccagagctttgcaggagccattctgtattacccacattattgaggaatgccacaggctgagttggaaaccgtagaactccatgtaggtaatgaaaatatcacctgtcctgggcctgccttgtctctgagggcctcttgctgtggaaaatgtttgtctacacaggtcaactgaatgctcagatgaacccatttagggtcatggtagttgcctatcagagcaaaacctttctgactttcttccctgctttgccatgaagatgttactgtgggagtattccagagtcaactgctgaagaggcccctttatattcctgggcatttacatataaaagataaatgtgccttggacttactgaggcctctctgtagctttctaatgtaacctatgagaaattactgttgccaagaaaagaaacttagttgctgggcagtggtgcagcctttaatcccagcacttgggaggcaaaggcaggtggatttctgaggccagcctggtctacagagtgagttccaggacagccagggctacacagagaaaccctgtctcaaaagaaaaaaaaaaaaaaaaaagaaggaagaaacaaacaaacagtttgtttcggttctggcagtaacacattttttcctcctgtagtttattcaatccttgagttcattcagtccagtgagctcgagggtttagggcacgagccatttatctgtccttttgttccaaaaggtttcttttaaaaaaaaaaaaaaattatgggagctacagataatcaagtgaattttaaaatttgaactctgaagttaaaagcatacagacttttgtcatacatttgtgtttatactttacaagattaatcagggtttatttatatgagctggttgagcaacgttgttggggacttttccatgataaatggctgggtgggaatgtggtttgaataaagaacatggcatttgctcttgcaggctgcttttcattccaggatgtcaggagtcttatggaaatcagctcattaatccttcctgtcctcccttctccctttctcagccttcccttctcagtccagttctttcctctggtatgagggcagcggttaccagatcccggtgtgagggcagcggttaccagatccccgtgtgagggcagcggttaccagatcccggtgtgagggcagcagttaccagatccccgtgtgagggcagcggttaccagatccccgtgtgagggcagcggttaccagatcccggtgtgagggcagcggttaccagatccccgtgtgagggcagcggttaccagatcccggtgtgagggcagcggttaccagatcccggtgtgagggcagcggttaccagatcccggtgtgagggcagcggttaccagatcccggtgtgagggcagcatttaccagatcccggtgtgagggcagcatttaccagatccccgtgtgagggcagcatttaccagatcccggtgtgagggcagcggttaccagatccccgtgtgagggcagcggttaccagatcccggtgtgagggcagcggttaccagatcccggtgtgagggcagcggttaccagatccccgtgtgagggcagcggttaccagatccccgtgtgagggcagcggttaccagatcccggtgtgagggcagcagttaccagatcccggtggggtggaaatcttgcccaggtcaggaagcaagtgagattcagaatgagccccgtcctgggaagggatgtcacaacattgtctagggatgtcacaacattgtctagggatgtcacaacattgtctagggatgtcacaacattgtctagggatgccacaacagggtgcagtccaggccccttggatggtcctcctgctgcgcttgctgtcttcaggctgcagctctgctgtcctagcagtcacaggctccaccctaacagaaagaactttgaaaagctctctcaagcaggactcagaggaaacggcttgtttaccttggctgtgacttgggattacaattatattgggcttcagttttttcagaagtggtttgttatcttgtgtttccctcagccataaaagagtaaatatgtattggatgttccttttagaaaacttgatgacataaaccatgtgtgtgggtacacgtgtgttaatcctactacttaggggtacggagacaaaggggctgttgcaaatttcagaccagtctgagctactcagtgaaacagtttcaaaaaaacaaaccaaactgaagaagataagcaggtgagctttgtgtgctgctgggctctggggtggggaatgggatggccgaagggaaacattctctacagaacttcatccctggttttccttggctatcattcatagcaaggaaaaataatttgaaaaacaatataaaagtgaaatctactcttagcacagttctctgtggttacatcatctttttcctttttttaaaaaacatagctaaggttctattaagtataaaagttatagcttcctttttttcacttggcaatatgaaaatatttgctattattattacttaaaactttatggctgctatggaaaatggtatcacacttccttaaaaactggaaatagaatcagtatctaatcctgcagttctccgtctaagttcagagaaagagaaagcaggcttcgatggttgtactgctatgctcagagcaacgttcttcctggtcaccaaaccacagaacagcagtgttcattgctgacaatgtaagcaaaatatgctatatacatatggtaacattagtccatctttaaaagagaagttcccatcctcaactagggattgaacccaggcctttccacatgctaggccagtgcgctgccacagctatatccccaagcagcaagagagatctgacctgtgccaccacatggaggtaccccgagagatggctggctgagcagatagttcatagacacagaaagtagagctgtcattggcagcgtgtgatgggacagccaagagatagaagtgctggggttaacatagtaacttcatacttaaaacatttaaaaatagcaagtacaaacaaaaactaaaatctctattatttcttcagagtttttttttttttcaatttggggaattggggggttgatttttcctatcactatccatctctacaaaaaaaataattttgcctaattttgcctttttgattaactaggaaaagaatcttttgttgaaaagtgggcttaagcatctctctgtgtgtctctatgcctgtgtgtgtgtgtgtgtgtgtgtgtgtgtgtgtgtatgtatgagggggcggagagagagagattgggcttattggtttgttttgctgggttttttgagattggtctcattatatagttcttactctcctgaaactcaccaagatccacctgcctctgcctcccaagtgcgctgggattaaaagcatatgccactataattggcttcattgctctactttgccttcattgctgcgtgtggtgtggagtcagtctgtaactctggccttaggtttcatttctaaaagcagactaagtctcttgagaggcagcgcagtgctacagctgctgtacgttgtgagaccctcgtcccacaaacagtgcatggagaccttgccaaaagtttaagggtttttaaaagttatttttggaatgcctactttgtaccaagctctggatgaagcaatcaatatatatgattccatgagtttatctcaaaatgctcttggtattagaaaattaacttttctgtgttgacacaccctatgtataacactagtttagtttggcataagttcaagagataaggcaaacaagtatggttatgttttcaacttttactttcaatgttttaacacagtaactgacacgctttaaccttttgtttctggttcataaggacttttccctgggctttcccagggtaccactagggcctgggtgtactgtgtgctctgccaggggtgccaggtaacaaacaaaaacttgttcagatcctggtagcaagccatgtgctttatgtctctttgtgtgtgcttgtttgcacattctgtcttgctagcctcctcctgggagagtggggatggtgatagctttaattttactttgagacagacagagccttgctccttagcctaggccagccacggccctcctactgctgggatgacactgggacactaccactctggctctggtcattgcttttaatagagcgtgctttacacacatcactgctgtactcacccagccacttctcccattaggatcccacaggagactgtgactcctggtcttggcactaacaaatgccaggttggctggtagcaagttttcattccaaacaatagttcctgatgctcagggtagaatgctggaatcaccggggaagatttaaaacctcccagtgtcaactcccaccctgagagactctgctgtagaaataaatgcctttgccttcccaagtccactgaagccagggaccctcatgtggtccttgttccagagggtcgtgttacattttcatcttttaagatgtggctaaagtagaacaggcagtacttgggtcagtttgtttatcagccttttctgggcgaggccagactgacttaggcactgcaactatttcttaaaaccacagtgcagtgtaaagagggcaacaaaacaggttctcaggcaaactcctggatctgggatttaaatacggaaaaccctgtgaagtccctatgcatttgcagagatgtaaccctcagaggtcaggagaacccatccatctacacagctgaacaggcgtggaccccactgaaaactgctaatatctgtactcagctgccaagtccttgtcaagctttttcctggaccttactgcctccatgtgtccagacactgcttgtcatgttggactgtctaaaatagagctgctcagatagaacgtgttctcagaagtcactagttagactgaaggtaggacctgagcacctaaatacttggccagctccaagtgagagctgctgttgaccctgagacaaagttcatagtttatgaacttagcaaaggctaagccatcagccactgtagttctagcacccagttagaaatgttcttcccatgctcatggccttactcccccttgctaggcagaagcagactcaagacttccaaagccatcaggcctgcagcctctcccaatgtcagggctgcatggtaccaggacactgtgggaaagttatatttcttggttcaggcagccatccctgtggcctcagggcctgtgggaggactggtgctctgttggcatgcagttggctatttgtcattctgttaaataaatcttatagtctgatgaggaaaataggcttttgagaatatgagaatagatctcaaggtgagtaagaaaaatgtgtgtgtgtgggggggggggttggttggttgtttcagtaaaatggtgttgatgaagggagtaggtatgggagagcttgtgtttgtgggcccactctagtacttggcccctcaagccagctctgacttgcaaactgtgaactgtaacacggctcacctccttctcagcttcctttgatcactcctcccacccctgtgtcccccttctttactagtccccagtaagctgagtgctgttccccttgagggcctatgggtttaagaatgtgagtaaaatgtgcttatagagacaaggctggggcttgcttgtgtgtggcagtcccaggtcttccccagacgtctatagccagcttcagaatctgctctagaaagaattccatttgcttcacaagagctgaagacagcattttttttttctaaccaccagatttattcacacaagagactacactgccagggcagaaagactggggcttgggtctgattctactttcccatggccccagcctcttcccagtctcctgtgttctggactgctctcctccacaggaagtagctcgctcttttgcagtgacctgagaaacagtgtggctaagccctcagcctgctgcagcttgctgtcccacctccattgccactggcaggagtccagcccaaaggggctgttgtagtagggtgatcgtggggcattgtaaggctatcatttgtggtccctgccaagactggaagacacgcgagtctcaacaaggctagctagtcacgtagcacacctgcttttgtgggggggtgggctgggctggacttggtgctttccgttcctttttctcttttcttcccccacctctcctttttctccccccccccttcttttgtctaaaaggtttccccagcagtccctcttcttgacatctgagggacagacagattgagtgggaatgtgaccactgccttgctctcagtctgagactctggggagaggagactaccattaggacttcttcagtcctctaactcagcctgttgaggtcaccttcaacctggtgaagaactgatgggggaggtgggattggtgtattttagatccagacttcttccctttcagacatctcaggagtgtttaaggccaggacaccttgagatcctgtttgtatttttaaaacaatagaagtatgaagttacatttcaacccaaacctgtgaaacaaggtgcaaaacatcctcttcgttacatactgcttttgcaaatgcagcaaggagcaagctgttgaagaagtgaaattggaagtttcttgctgacagctgggcttatgcaggctggtcggggtaaagcagtcttatgcggattagtatgtttaactgagcccaggatccagatccaagcgtcatactgcactggaaagtgaaagatagtcctttcacacagttgtgtaccaggcattcagtccccaactgctgatgctttatgctctttaaatgccgaaatctgcaaccctaccctggagttagtaataagcttgtttgaaggcacagaaataactatcttcctccactcagtgctgttgatcttgggagaatgggggtggaatgttgctgttagaagttttgcacaatattgtcatggtctgacttgcattttcataatactatgtagagccctagtacagtatttttttttccttttaatgtatatcaagttctgtctcttagataaaccagggtcttccttgagccatttccagtgaattaaaaccaattccaattcacagacactagagaacaatgtagtagcgtgatggagaatataaaatgaatgatacttttagggcacagtgggtgtggccttataattccagcactcaggaggctgggacaggaggattgctgccagttcaagacttgcctaggcagcatagggaaaccctgtgtcaacagccaaaatataactataagatggaagatattgtccctgtttcaaaaaccactcggggatgctagggagatggcccagtgggttaagaccacttgttattcttgcagaatacttgggtttggtttccagcaactaacaattagctgcaactccagtcccaggagatctggtcctctaaaggcagcagtcatacacatggtatgcagacatacatataggcaaatacccatatatataaaataaaaaataaatctcttaaaacaaacaaacaaaaatgtctgaccaagacaagaacagattaaccataagcaagtaagagtttaataagggctgagatgagtcactgtagagctgagatcgaagcaataagtgcgagcttgtgggctgaggagtcaaggaagtgttctgagggaaagagacctttacaggctaggtgaggtttaattgttcgataggctaatgctgtgtgattgcagaatgagagaagttacatggatacagcccagcctttgttgactaagaagcaatagctgctactcatgcagcaaggagccttagtgcagagctcagcattgcggtgagcactctcagcatgggctagagccacattagggcctccgttgtcatggtctgcttatcatgcagtccagtgtcatgaaacagttaaccaatcgtggcgctcaaataggtacaaaagtacagacaaaaaggctttctaggggagctggatgtttgagattagctttaaaacaggagtgtggttttaaataccagagtgataggaaagagcctgtcaagatggtgcctctggatctcgcatcatgagcagtgggcttatagaaccagaagagatgctgtgcaagattggggaagagaacatatgggacggcccttaaaggaattggtgcttggatggggaagaggatggggaagagaacaaatgggacggcccttaaaggaattggtgcttggttggtccaggactttaagagacaatcgctggtctcgggtagacactggtgaaaggcaactgcctagacacacttgaaatccaaaatttcagaagctcccgagcagccgtttgctagttaccagtaatggaaatatcatggcttgcatctttgtatttttgttaagaggaccatagaaggagtttatacttggaaagggaatgtaaagattatctcgtctggtgaaattcttccctcaaaaagaagcttttgtggaaactcaagatgctggagctaacctaggagagatggtaaatacagtttagtcagggtgaggcctggaggctgcctgatgtcttccatcccactgggagcacagagtggactaaggaagtaccccgactccatatttcaaaacagtgatcaaataaataaataaataaataaataaataaataagcagaagagatgattggcaaggggttgggcagccattgtaacagatgtggtcccccagaagacagctccacttggggtgaaagtaacaaactctgatttaccttttgcccggcctcctgctgcctgatcatccttgtagaagatcctgcaagcctgcactgttcccaggcctcttgcagaagccacactcctatagaggacccagctctagactttgccattaaaggctgctgttctacacctcttcctgagaggcctgctccggcaggctgctgcctcttctctgccaagcagtgtagattctggtgtgtgagtaagttagttctcctagtcacccagatgtcctgtaggagtgatcttttagtgcctctggagtcatttactctgatacagactttatggcaccatgtcccttccctgcctcagtcttgagctgattaggccctggtacccaaatgccctgtgtggccagggtttagccctcttccaggaagacttgtagggaaggggctggtgtgtgcatgggtgagggggcagtatgggagaggccctgcactgcctccctgcaaagcactcctccctgccccctcaactacctgtgggacctaggcctccacagtgataacagtggcctgcaaggctgtgggagtgccttcccatgcaggccagagcatgaagagccctccctcagcagcccacagcctgtgttctggggagggcctacttcttgaggcagtttaacaggaagcctcaagcctggggcttggggagagcatacatactatagtaaactcaagggaagcactgccaggcagtccctgaagcccactagtgtggcctgtcccatcccatccagaggctccatttttatcttcagagctgaaagctctaaagttaggannnnnnnnnnnnnnnnnnnnnnnnnnnnnnnnnnnnnnnnnnnnnnnnnnnnnnnnnnnnnnnnnnnnnnnnnnnnnnnnnnnnnnnnnnnnnnnnnnnnnnnnnnnnnnnnnnnnnnnnnnnnnnnnnnnnnnnnnnnnnnnnnnnnnnnnnnnnnnnnnnnnnnnnnnnnnnnnnnnnnnnnnnnnnnnnnnnnnnnnnnnnnnnnnnnnnnnnnnnnnnnggaggaaggaaggaaggaaggaaggaaggaaggaaggaaggaaggaaaattagggtaaaaaatggagaaggctagaaaagacatagtaataatagctttgcaatgtgaaagagccaagcacatgagaggggtatttatggtctaatagcttaggctatgttacattgtcaggcatgctggaaagaggcccaacactggcatgtgtgggtgcacaccagcatgccctttatgcttggcacactgtctctcttcaggagttgtgtttggaacataaatacaatgtgtttgtctggaaaaccttgactctattcttggctttgccctgattttggggaggtcacttgagcactataaacagtgttgttgattctgaaaaatggaaaaataatgtctatgtttcttagtaaaaagataaaattaaagaaaaatatgtttgaagataaccttttcataaaatgtggtctactgttcttccattactcttattgctggaactgaggtccaagcctataccatgccaacttcacatgaccatagtttgtcagacatgctataagaaattctccccgtgatacatccagacttgtcattcagcatccagaagttgccattttccttgtctgctgctggaaagtgagctggaagaatagaagctctgttagcatcctatagcataatcaatgctaggtagcctccaagaccaaactacaaagaaggttttctgagatactacttctttcccataattcccagctcatagcttattaagttattaaccagcaatttctctggcagcatattaaactttacttttaaacaagtcacagagggagggaaacatgcatcgctcataaaacagtttcccaggctttgaacaaatcccaaaacccacacaaggtctctttttcatcattctctgcacacagcttgaatagtagagcattaataagaaaaaggtgcttaatgaaaggatggaaaaacacaaaagtctctgggagtccaggggctccctaaggaccctctgaacagaccaggtgagccttcatgcagcaagagggaagtcatggcttgagatggcaggattcccccttgtgtgtggcagaagggaagcagagcaggcttgttttcagacctgccttgagaagagggccccagtgccttcctcagactgtaggtgagccttatgctatccctccccagaacttgtcaaagggtaaaggcctcagctcttctgaatcctctcccctcagagaaaagctgttcccccagaaggaaccatggagggataggtactgggcctttgttacttttccagacacttccagcttagggtcaaatcccctgaagactggtccataccaaaacaaggcactgaggaaaggcttcattttaagagcccaagaaggagggctacatggcagcttctccatttggggtatgtgtgaaagcactagtgggtttagttgcagtaatcacgcagcccaccagcaccagcccttatgaggacaaggtaatcttaggactgggtagcctgccaaccccacatgttgctgccagctggcttgcctgcacatctgattcctagctggtactgtggagggaaatagcttgtttaaaattacatattctgcaattcatgaccatttggcatcgtggcttaaacaaatctccatttgtttctccaagaatgccatatgctggttggttgcccaggctgtggtaaaaatggacctcagaatgggagcaggagcttctctttatttaatttacacttccacatttacatggcttagtgtggtctgcatcaaaggaagacctcctacatcctagccacagcagctctgtaagcaagcacaagctctgtggacagcctccacagccatgctgaactgctgggattgctaagagggacagtcaggaaacccagggactgtcagcagaacgttggctagcacagcagctcctctgtggtcagaaaaggcgtccctagaggacaagcttggagaagaattttaaataaagggcccaacacagcaggcaagggtcaagagcccagtcataacagggtgtgcagacattatgtataaatggcgccttctctgccattttctggcctcctctccttcctcccgcacctgctctgtccactttccttcttccctgatctgatggccattactgctcttccctgctgcccctccccgtgcccacagccccctgtgggctgctgaaggccagggctacttctcacttgcagccgggagctcccactccttgctgacttctttgatctgcagtttgaagcacccagaccaggatgagcctggtcccatcatcagacatgtcagctgtgactgatgtatgtctggcacctcctcctttttcctctgactagctcaatgactttccatgtctccagccccctcctcctccaggacattcattttcattgctttttgtttttttccctcccctctctccaatcttgctgcaggatgcccctacagtattcagtagaccttagccttgggtccacccagagcttggggagtagttccctggggagtccagatcaggtttcctgacttacatgccaacaccaggagcacagagcagaacagttgtttccagccctctctaaatatgacggtggattcttgtggaagagtttgctgctacatatacaaagtggattgtctctttgagagagccccggtgggttcacagtattaagtggacatccaaatctttcagtgtgatttgagctgatgggatgatccataggaactttagcccgttaggcttcagagcgctttacaatccatcagctctaagatctggcccctattcatccttcccgcagcactcccttctggtctcttctcctcatctttcaactctacgttctctagagatgctgtggacccaagtttgtgggtgtaccacttcctctgctggggtcagtgccggctgctgcccagactcctcaccaggtcagtctcctctcctagcagccttcattttgtctattgctccttctttcatgccccaccctatgagagtctgtatgtttctcccactaaaccaatatatttcaagtatttgttttgttttaaatagacaaaaaaataccatacccccccccaaaaaaaacccttttacatggtggccaatagatatgtgtgcatctatgtacatgcatacacagagatacactagacacaccctacttgtgaaatctaatatgacttgaaattgtgaataatagctaataatttgcacactcacctcttaaaacctgcagcagattctgggaggcagaaccaggaggactataacaagctcaaggccagcctggcctatatagcaagttccatgccaggcagagttttaagcttggtggcacacacctttaattccaacacttaggaagcagaggtagaaggatctctctgagttcaagaccagcctggtgtacatagttagttgtaggacagccaggactacacagagagactcttgtctcgaaaacaaacaaacaaaaaagccacccccccacacacacacacacctagggaatctaattcagtttccttaagactcagcaggtttgctttcaggaatgtcagctttcagcatactcatacccttactgacaccattcagtacaatggaaggtgtgtctttacctagaaaaataatttaaaagttatatattcagttattttacctaaactgttgtatttcattaattatttcttatttaaagacacacaggattaatcattctgtgcaaacgctgtaactaaggtcctgacacttctagatacccttggagtttactgtcctctctctctctctcccccgacctctctcccgaccgtctccgtcctgtccctttcactggccgtgctccaccagtttacctcataactgatgaagaggtccatgtgtactgcagtttgaaaaacactattcaggattctaagttccttgagggcagtgactgtgtcatcttcatctttccagaacctggcactcgtcctggctcctagtaacttctgagtagatgttttctgaatgaataggcctcagttaaaacagatcggcagcctctgggattccggaagggccagaagaggtaaataatttatcacaggcttcccaagagctcctgccatcctctaaacactgggcccattgtggatgtgtcctgccttccacctgcagcccccagcttctgggacagagggcagaaggtgtcatggagttcagaaattcccaaggcaaaggttctctggtgggtgtttgtaaaaagacaagtgagttttagaaagaatggtgggagaaaaacaaggttctcagcgagcctttgtttcatcttctatataaacgtagtccccgtgcctgaccctcctgtgccttctaacactactgttctgctgggcccatctgttggaccctgcctgacaagttcattagactatgcccatgccaggattttttcatttggatgaaaaaaaaaaaaaaaatcccagctccctccacccccaaaccgtgtggcttgtttcctgtccagctggcttgctgctctttggggttttattcccctcatcaaagaggcttggacagaccaagaacaaacctctggctcaccctgaactcacatatactgaatccaagtcagagtgagtgagaaagaaagaaaaaagtattttcctgactgagaagccaggtcagagagagaaaactcaacagcctgactctacgtggacctgttctggagggtggagccatgagtggtggtcttcagccagaatcactctctcacatcctcagaaccagcatgggcagtgttgtgaccacaggtctctgttcatgggatctgaagtggcagtgtgttaaggagcctccatagttttgattacaacaagctggcccagagcctcgaagttatggagaagcctgagtgatctgtctctgcagtgtcccaggaagccagcacattgggcagccagtgtatgcttagggaatatgcagggggctctgttcattcaggaacgtttaaaggatgttagctgctgcagcagcacttgggaagcccaggcagaaggatcactgcaagttcaggacagcctgagctaagtattggaccgtgactttaaaaaaatcagcaggttttacagtggcatggctctatctatattctctatatttgggaggtggaagcaggagaatcaggagttcaaagatatcctctgatacataagaagttcaaggccagcctgggctatatgacaccctatcaataataataataataataataataataataataataataataataataataataataataatacaaaaagaaattaacttagctaaaaaaaaaatctcattgtaaaaacctattattcactgagttttaaaagcaaaccagtttaccataagcttgtccagaaaacactcaggcaagaggctgtaatgccccatagcatgtgggagccatcaataacttaggaccttaaggtcactcacttgaaacaacgcatttgctttcccacacatgccatgtgttatcatatctcaaagtgccctctggtcaacttgtccatctgaattcttcccatcttcccctggccacgctcacatatgaggactgagactgcagctcagcggtagggcacttgcctcttacgcttgacatcctaggttcaatcctcagtacagccccgaaagacaagacaaagtaaaacagcagagggtactgatattcttctaggccgttgccatttctcctgtctactctggcgtgtttttttcctccttactccttgggtcttatcttggagtctctgctgtccctgtgtcactaggcagacttctcagcagcctgctgccactctttttgtctcttctccccagacctagcacaaaactcctggggccatttgctcagccctgtggctcattgagtttctgtccaaggctagctgcctgttttctgactttgttacctgagtagtcttttggcaggacagccccagctgttaaaaactgatatggttgtggaagaaagaataacaaggaattgtgactgagaaactagagggaaacaagatacaggcaaagatgggcaagaagaggaaggaaagacaagggtctgcagtggtgcttggttacttggtagacggcttgtaaggatctgaattcagatcctagaacccatggaaaagcagacatggcaggacatgcgtgtaatcccagtgctgtgggagcagagacaggagggtccctgggatttgctggccagatggtcgagctcaggttcactgagtatccagtctcaaagggacgccttgggagtaagaactactgcacaggcctggtggccagtgtttaaatccaagaacccacagagggggaaaggaaaacaaatttaaaaaaccaaccaacaaaaaatccaaaaaaaaaaaccatctacagagttgtcctctgacctcattgtatgtactatggcatgtgtgcacagcacacacacacaatagtacttttttaaatttcttaaatgaaagtaaggggaactggagaggtggctaagggggaaaaggcattgctgccaaggctgatggcctgagttagatgtctggaacccagatggtggaaggagagaaataaatgatctctgatcacccctgtgtcacgcagacacagttcttagatgttgaaagtagagaagtagttgagaaagacgcctggaaagaatcctttctgcacacacaggtagattacagttgtgcaccaccatacatgtgatggtgctccttcatggtagagtatgccagctggaggatgtgtgcatctcagaatgacggtggaagcactgtagggaaccagcagacctgcacctgtacagccacagcactgggctgtcctgaatcctaggtcagaagtagaagacagggttgaacctccctgagatttctctacctgccaggccttgaataccatttccagttgactctgaccccttaatgtctcagtgactcacagggaggcagtaaggtcagtgcagttacagagcagtagtctgctcgggtcacagagataacaagtgacaagctatgtaccagaccccactaggccaggtccttagcacaccaaatctgggcctatgtagtctcaggctgaactgggactcagagccagggcttctcaagcactgttctaaaaagaaaatctaagctgcctgcctatggatctgctgtacaggtccaaagttaaaacgagccaggcattgaaaaaagaaaaacatctcatctactaggaggaccccagctccagtgtgtgttgatctgttcttgttcagtaaccattttcaactggtaggtgttgttttttaaatacctgacttcataagcggtagctttcatcacgtcattttctccagctcagaggggatactacatcttcatagcaccttctccctgttttcacgtcagtaggatagatgtcaaaggcttaggttatctagagcatggcagggcagttttgtcttcttggtcctcacacagactgtggtgatatgagtaagggtggcccggagactcttgtatttgaatgcctagtcgtttgagaaggattagaaccataggagaccaggctttgttgaagtaggtgtgacctggttggagacagtgtgtcactggcagagggctttgaggttgtaaaagcccacagagggccgggatcaggatggaaaggtctcatacactgtgcccgagtgcttccgtggccccttccatgaccatgatggagtagtcctcagaagctgtaagcaagcctccaattaaattctttctttgggtgctacagagataactcagcagttacgagcattgactgcttttccagaggtcctatgttcaattcccagcaaccacatggtggctcacaaccatctataaagggattccatgccctattctgctgtgtatgaagacagcgacagcaacagtgactatgacatagacagagcctctgtcacaggtttggggactcattctgttacagattgctaatttcttcctacccacagtagtccatcattttttggtttttgttgttgttgtttttagtataatgtagctgcctaattacatgcctagtagaaaacacctatttttcccctccccaaggcccaggcaattaactctccattctttacttttctaggcaaaatccatgcctggtaaccagagctgtgtatattgatattctcttcctgctgactaactgcctggacagacctgaggaaggcaagcagacaggtatgactggcagttctcccttggaacattgcaggtagcgttttgggtagcacacacacccacggctaagtgtgagactgactcagaatctgtgtggctctttcctagaagctcaaggagacctgccctcacatatgttctatgtgatcatccaaaaaacgagtgtgaatccaactcacatacctctgtgttcccaagaccttgaccttttgctgttctgtgcttttctttgaaaatgtcattttctgtaatggttcatcctgttccatcctatagatagctgaactggctcgtcccttggtggatatttgagcccctgttctcaatctacccttcaccagttcatgtaagagttcctccctcaggctctgacttcatacatgtctctaggctatttgattcacaaagtgaagtaaagagagaaggatgtcccaaataaaaataatttgatatgttcgtgtaagaaagaggcctcagaaagtgtactacatgagttccaggccccaggctgaaatgtgttctcacatccagctggaacacaggacaatgagcttgcagctaaagcccctcctaactgcttaggagtctaaggaggctgcacatggaagtcaggttccgagtacacacaggccaggccttctcttgctggaatttagcctaaccatgagtcgttaccttcagtaaatatgtccaggctgtcaaagtccagctctgtctaaatggagctctgttaccaaattcaaaccaattgaaagtatttgtggaaagggcattgaaatgtctcacccagattaatgtgttattagctcacagagcccttgtggccatgcagaggtaatcagaacacataatcctctccacatccagtagtataagatcatgttgctttatgggagacgtttcctggtttacccaggcattgtgtctcatacctgtaatatcagcactagagaggtagagacaggctgggcgtggtggcacatgcccttaatcccagcacttgggaggcagaggcaggcgaatttctgagttcgaggccagccaggtctacagcgtgagtttcaggacagccagggctatacagagaaacctgtctcgaaaaaacaaaaacaaaaaaacaaaaaaagggggggggggaggtagaggcaggatgatcaggagttcaaagctatcctcagctactcattgagttctaagccagcgtaggttacatcctatcttcaaaaaaaaaaaaaaagctaacattctaacttgtacctttcatctcaacatagttatgaatattgtcccacctatattctttagactatccaggtctgtgtaataaaatataggtcgttctagctgtgtggcatctactttagtttacacttgagttaactggaatccagcgattataaaaagaacaaaacccagatgctaacaagcaagctgttctagactcttgccttctgatcttctcctcagattccacatctgcagatgtgactggaaggtctgcttacagcctcctcactaggacacccgcagagttgtgtgtttgactgaaattgttggacagtgggttctattcatatggaaccctgttcctaaactctaagccatcttaaagtgctttgcaggggccaaggacatgtgcagccacctcacccagatgtgcgttgtgtttagtctggtacaaaagggtcagcccttggatgctgtgatgctgtgcacctttgcttccccagcttctttctcgtcctttgtctatgaaccccatgaggatggatttggggactctttaatcattctatcctccaaactctttccatcagtaagagcatttgccccagttaaatggcatcacacaccgtcttcactatctcactcgcacacatcactcttcttagcatcctttatggagtaagacttggtgggaacacagcatgtgcctctttctctagtgtgacagtcatggctcgacgtgtgctgtacttgtactgcccagtgagatagaaacaagctcagaggtggcacatgagcgtgtgatgtatgtagctgctctaaagtgagatgttctgtaaatataaaatgtacagcagatttcacagaattccagcactagggaggccaagacagatttaagcccagcctgggctacctatcacaacatgtctatgaaatacttaaaaggcagggcgggtaatagctcagagaagataggcacttgctgccaagcttgacaacctgctactgatccccagaacccacgtgctggaagcagagaaccaacctctgaaagttgtcttctgaccttcataaacttgccatggcaactcatgttcacacacacacacacacacacacacacacacactcaagtaactcattaaaatagagttcaaatgttaaaggaagaattttttcagccgggcagtggtagtgcacacctttaatcccagcacttgggaggcagaggcaggcggatttctgagtttgaggccagcctggtctacagagtgagttccaggacagccagggctatacagagaaatcctatctggaaaaaaaaatttttttttcaaaaaatgttatgctgattatttgttggaaagggaatagttttggcatcattgcattttttaatttattattaaaactaatttcatgaatttcttccacttcttagtcaaaatgtaaggagttctgtgtatagcctagtgacacattacatacccagcatgtgcaaaggcccagagctcgatcccagtaaccacaagacaattcagatgcaagtactaaggcaagtatagtgactcacagcggcagccgaggcgccaggaaaccagaattggagaactgctgcagtttaaggccagcctgctctacatagcaagttccaggccagccaaggctatatggtaagaccttgtctcaaaagacaaaagaaaagatggtttactgctaaaataggaaggagggaggtaagaaggaaaacaaagctatcactgaatgcctgtgcttcactttgtcatggggcagtgcaaagagggaaggcaggggtccaaaggtttaaattccatacataagccataaaagacatggtgtctgtgtatatcgtgttcgcgcatgcgtgtgtgtgtgtgtgtgtgtgtgtgtgtgtgtgtgtgtgtgtgtgtgtgtgtgtgtgtgaatgttgtattcatagaatgtattcatgtaactgtaatagcaaatttccctcctgggtctctagaactaaccaaatatcaaaccgaacagccttcagaatggctatcactgtctggggtagagcagtggccgtgcagcagtgaagtcgctgctgtgttgatggactgtttgcagctccagcagcatctgagcacttggtaaccccgccacccagtaggtgggcccttactagactgggcagattcagtatgtttcgggatcctgttgtcatatcacattcctcttgtaagcttccagaaggatgaaccatggcttgggttctgtgtagcctaactaagctctgtaatatagtaggcctcatgaaacagggtggttattaactgatggactgaaatgcagttttcatcgatttttaaaataatctgcttgctctcaggatacagtcttgccagatgtggtggagcaccctgtaatcctagcttgggaggtggaggcagggggtcaggagttcaaggtcatcctcggctacataatacgtgtgaagccagctgagctatacagaccctgtcgcaagcaagccctcctcccaaaaggaacagccttacttagtctgattcatcaatctgatgtgaattagtgccccgaattcaattgtgttgtttatatattcatacatgattataaccatgtatatatgtgcctgtactattatctcacaaaactcataagtacaccacagagactttgaggcctgatcccagatttgaatcctacttctgcccacctgactttctttccctctccctctccctctccctctccctctccctctctctccttccttccttccttccttctttcctaccttctttcttctttcttgtattcttttctttttcttgaccttagcatcatacttaacttctgtaagacactttttctcagttgtaagtgagaataataaaagagtgtatgggaccagcaagatggttcaccctggtaaccagagttccatttccagagctgacgtgatggaaggagagcactggctcccccacagtaggttaggttatcctctaacctccacacaggtgctacgggtccatccccataaataaatgtagttaagttcaaatggaatctacatcttagagtcagcttcatgcgagcacatgcttcacgtaagcacaataaatatgtgctcagtatgtactcgctactgtgggcttcatgatgtgcaccactgctcatcatctggagccttgcatccagcctggcccctgcagccgggcatcgctgtgctcctcctacgcatacatggctttcctcccagtgtttaccacgtaggaaggaagaaatgcttgtgtgcctgcttaggcgtctccaccacccgactgaggtggacaaagactctttacttccctttatattcgtgacagacgtgagtgtccgatacctgtgcctggagctaagaaggaagcacagtagggactagagggggcgctttccaagatggtacctttctccgtggggatgaggcctttgcagggaagagcttagtcagattttcacaaatagcagggattcagaagatgaacaaagatgtggatgttacaaacagaaaggaaatctacactactttcaaagaattggcatttggaatttggggttcaaagctaaacaagtgctactaaatgtgaggcccccaaagcagaaacagtcacacaacagccccataggccaaaatacaaggagcccagatttgactttataagcaaaggaagctatttcatgttataaagcagtagggttaagtgggttttaaaacaacatggcctctctttgtctgcacttttcctaaattcccagcacggttagggagacaagttcttataaataaataaatatatatatataaagattcttggggtggtgcattttaaaaatgttctctttgttttattgtgtgtgtgtttagcatatgtgttgtgtgtgcacatgtgtgtgcacatgtgtcagcactctcgtaccacagcatacaaatggtcagaggacagctttccagctttcgttctctccttctacctcatggactctgaggatcaaacttaggttatcaggcttggtagaaggcacctctacctgcagagccatcttgccagactacatctcctttttgttgaggccatatcttaccaagttgtcctggcaaacctagaacttgccatattgatcaggctgaactttaaatgacagagatttgcctgcctctgcctcccaagtgctgcaattacaaacaaatttaataagtccagcattagagaaaactcattcacagactgtcatggaggtttgtttggttatcatgatggcagagaatggaggaccagaccagagtgaaaggtagccatgctaaagaatagctcagggggcttaagtgggtggagctgtgggaggcatcttccgagtatttccattttactaatgttatagcacacctcagtttcattcctgtgtatgaacgtacactttcattacatttttgtgagtgtgtgcatacaggcacgtgttcgtgtgtgtgtgtgtgtgtgtgtgtgtgtgtgtgtacagctttgtgttgattctcttctgtcttgtgggttctggagattgacctgcctcatcagacttgggagcaagcacctcacgttctgaaccatcttgcttgtctggtacatttcatagtaaatttaattataaatgggactcattgccaaaataaacaaagcactaatttgaggaagatttttggtttaggttttgcatgaaagaggctctgcccatccctcaaactgtgttctgttaacagcattgaaaggccgttcctttcagtgaactctgaggtgccttagaataccttggggggggggtgacaggatgagaagaaccccattgtgtttggagtttgaaagtgatttaacccctgggagcactgagtcctctgtatccttttttcctttcctgccatcattagcttacctcagtctctgtcaggaagaaaaatgagttgcagctgcagctgagagaaagggaaagtcttctagaagcccagaggctgaggtgtaggcctgtgcaaggggtgcaagggcagttattcaattctaatctaaagtctaacctaagctacttgtactcgggaaggaaatgtcccactaaaatatctattgctaaaataattccctggtacttgctaaatatcccgtttgctctgagagataatctgtttgcctgtagacctaccccttacatttgttttcattttgcacagctagagtttatttaccacatatttaaataaatatacttaacacgtctcttcctctctccttccctccctcccccttccttctctctttttggtgaatccatgagtggttatttctttctcaggtccattttatgaatgtagttgttgttgccattctttttgagacagggtctcatgtagcccaggctggcttcaaactcagtatgtagtcaagagtgaccttgagccagcatggttttatgccaggctcaagactgagctcggcctcgtgcatgctccatcggtcaaccccatgttacttacttggtgccatctggttgtagtgttctcacccgttgtcttctagtttccattgctgtgaagagacactgtgaccaaggcaccctagcatgtatgcaggatacctatgctactctgctttcatctcactcatcacgtttaatgacggcggccagcctttgtagactgctagctctgacaagtgctgtctccagcatcccgtgtgcgtgaatggaggaggtgctgctgatggtcctcatcgttcacaatgaggcagagagaagcaccgagagtcctgtgtgtcctaagactccagagcccgagctccccatctcccacaggtggcatgtctgagagacggccatcaggaaccctgagacagccctcctggatcagctccaggccgacttccctgtgctgcggcttctaagtcacagtgtttgcagtgtcgtccctaagagtgtgggacaaccttaggccagagctgggactcgggtgtattactagaaagcgagcacttgccactctgggcaggacccgccctttgcgcctttgaaaatagacatacttagggccaccaaacaacacttcccagaggcagggtgctgggacggttctatgctttctttgttagctggaatttataggtcggatctcatcactctgccaagtacaataaacactccttcatcgggaatcttagtttatagtcgttactttttccttctggatgtcctacaagtggccagctcacacggtgagtcagaaccctaactgtagctgccgcgcagtgcgctgtgtagaccacagctgggtaagaacacaggccactctgtaatgagctcggatgtgtagactagatgctgcttcgtgagatcagccctccctctggccagcctaggtgctatgggtcaaatggtgaagtctgtgcgacgtgttcagcaatgcttgtgtttgtattgcttagaacatgagcactgcatgatgtaaagaaatacagtccatgatttttatgacccatgaacttcctttacctcattcctaggaaatgcagctgaatagttagaggataaagcagtggcagcctaccaacgcctgccatggttagccaggctcgttgggttagctgtagccagccccacctgagcagctgggcgggatttgtcctgtcctggttgtgtgcttttagtgtgcgtgcagacctgcctaactgacacagctgatgagattctcttggctggggtgagagagcagggggaacttgagaacagtttttagaggcttctgggacttttgatttctaagcctgcacctatgaaatttcaaggacgttaatgttcacgttttgtcatctatacattagttggttttctgcagaaactggactctggtctgaaatgttgcttttcaacagtgcactctgacataagcagctagctcccttctgcagaggtgcaaagcagggtggtaccggatgagtgcatagcatgttaactctgtgagtaccgtgtacagaggccactctaagaactgcagtctcatactgtctagtcagtaggaagatggagactctcccagggagtaacttgctcagccatgcagctggttactgcaaaggatccaactgccatgtcagtcatcgaaaataaggatagtaatgtgtgacacttagtcggactgagtgtctgtgtctgtgacagaaccacgtcctgaaacttcctgacttgcactcctaccccagagaaagaactgttcaaatgtgcaggatgacctcagaactctgtggttcctgtcccttacatgttcctgcctctcccctctccggcccttcatcaccaatcatgagaaactcattggcctgtctgttaaattgcagtgcacatagctttttcaagtctgtcagagatgttttgcataaacggaaagcattcctttgtggcctttcatgtctcgctgcttcgctccatgccttcgagtttcatccgtatgtagcctaaagctgcactcacttgggtttatagctaaataatattccactgtgtcagcatcactttttcagtcattatcaactggtgaacatttggtttgcttctacgtttggtcttttgtaaataacactgctataaatattcatgggctcttttttttttcagttcttctgagtaaattgcacataggagtaaagggggttgtggagacaggggataggaggagaagaaagggctggatcagcttcttgaggaattgaagtcttcctccagaaacacccaaggctcctagttctccccttcctctgccgtacttgttactgcctgagtacaattgcctgttgtgagtgcagtggccctggctgggctgagctctgacttccctctgactggtgatacagcatctttcctgatgtccattggacatttgtctcgagaaatgtctgttcagactttttgctcatttttaaaagattcattgtttatatgtatctgtgtttctgtatgtacatgattctccacacagaccaaaagaggggatcagattcctggagatataggtggttgggaactgcctgatgtgggtgctgagggcagaacttgggttctctggaagagcatcatgtgctcttaaacatttagccatctctccagccctcctttgcccactttaaaattggattaattatattttgtacttgtgaaagtacattgttcgatgtgaaccgtgactttttatgtgctaagttagtgttccactgtttatataatttgtttatggatagtttatcaacagttgatagacatgttggctattttttctgattagagaatgtcagatatggagccctgaacatcttcaaagaattgtttggttaaatgctttgatttttcttggggaaaaaaaaaaaacctaagcaacaaaacaaaaacaaacaaacagaaccagatgctgccaggtggtgggggctcacaccgttattcccggcagtggggaggcagagacaggcagatctctgtgaattcaaggctagctggtctacagagaagttccaggacagccagagctacatagagaaacccccccccccacacacacacacacacacaaagaaagacaagaaaaaaggaaggaagacagacagaacaagaagaagcatgtgaccatttttaatatcttttctggaaattctgtaaatcttatgttttagtcttatgttttagtaaaatattttttgttattctaaaaaaaaaaaatctaagcagattattaggccataggtaaaaagaaacagccagaatgtttatcagaagagatgcccacttggcattgccaccagaagagtggtccagttgctctgtgttctagccaacacttgacatcagcgtcggcagctgcatcgttgcagtgagtgtatgtagctctcctggcgtgaggttacatgaagttccctggttagattgtctttccgtgtgcagtatttgccatctcaacaaagtatccattcaacattttacatagctctataaactgatgtttgccttatcattgagctgtaagttctcttggagggggggcaagcagacagacagacagacagagagaacatgtatgtgccctcaggcatgtgaagaggacagcctgtgagaatcagtttttgtttccaccatgtgggttgtgggactcttgactccgatgatcagcttcgctcaagtgcctttacccacctattcatctggtaggcctgtggttttgtttcttatgctgtgtgtgagtttataaagataaacatttggtggatagttttttcctatctttgacttacattttcattttcttaacagtgtttttcaagagcagtcattctttttttttttctaagatttattatgtatatatagcactctgcctgcatgtatgcctgcaagccagaagagggcaccagagctcactaaagattgttatgaggcaccatgtggttgctgggaattgaactctgaacctttggaaaagcacccagtgctctttttttgggggggggggtggggtttcaaagtcagggtctctctttacagccctggctgtcctggaactcactttgtagaccaggctggcctcgaactcagaaatccgcatgcctctgcctcccgaatgctgggattcaaggcgtgcgccaccaccgcccgcccagcatatccagtgctcttaacctctgagccctctctctggcccctcattcttaattttaatgaagtccagttgattgttttcttttgtctttctttctttctctcactcacttcctccctccctctcttcccttatttatgtggaatgactttagcttttttgttctgttttaatcaggggtttccttgtatagcctaggctggcttagaactcatagtgtagtccaagctagatttgaactatcatcctatcttctccaggatgctgggatagtaggtctacactattttttttcttttttttttaattggatattttcttcatttacatttcaaatgctatcccaaaagtcccctatactctcccccaacccccgccctgctcccctacccactcattcccacttcttggccctggctttcccctgtactggggcatataaagtttgctagaccaaggggcctctcttcccaatgatggctgactaggccatcttctgctacatatgcagctagagagacgagttctgggggtactgattaattcatattgttgttccacctatagggttgtagaccccttcagcttttgggtactttctctagctcctacattgggggccctgtgttccatcctatagatgactgtgagcatccacttctgtatttgccaggcactggcaaagcctcacaggagccagctatatcagggtcctttcagcaaaatcttgctggcttatgcaatagtgtctgcatttggtgactgattatgggatgggtccccgggtggggcagtctctggatggtccatcctttcgtctttgtctcttcaactccttccatggatattttattccctattctagggaggaatgaagtattcacacgttggtcttccttcttgattttcttgtgttttggaagttgtatcttgggtataggtctacagtattacccatagatgtttcctgctttgtgtgtgtgtgtgtgtgtgtgtgtgtgtgtgtgggcgccctagttaagtccttgttatctcaaggtcacaaagatattctttcatacttttttctaaagcttagtgaggttgtatttgatggattcattggttggttggttggttggttggttggctggctggctggctgttggttagttggctggttggttgattggctgttggctggctggttggttaatgatcagcccagggccttggacctgctaggcaagcactcatacacaactactgagctgcatcctgagatctaaagctttatggctctagattttatatatgtgcatgacctacatctatgtaactcctatgtatgatgtaagataaatgtctcatatgattatcaattgttctaccaccattgtttctttgacctttttttttttgtaccttgcccacttcctcccctttcaggggttcttgtcacatgtgttaggtcacctgaaggtttcctatagccaccccacgttttaggctttttctttgttctttaatgtgtgttccatttttcacagcttctatctctgtgtcttcagattaactattaactagtcttttctgttgtgctctctcatctgctgtgaattctgtccactatgtctttatttcagacattggactgtttatctctagaagtttcattttgatctttttcaacttctttgaaccatcatcctaccttccccagagtgctgggataatagatctgtacaacataggagtctggaagttaattgacagcaaagaagggaggctatcacgtggagaaagagcctctgcgctgatgtttgggtgtctcaacccattttctgctgctagaaacatcacagaaaggctaacttacaaagaaaatagatttctttggctcaccagtctagaagtgaaagaacttgacatcagcatctacctggcattgtcgagggcgtccagtagtgacgtccatggcagagggcagcagtgtggagagcatcctggctcagacgtctctcctctttttataaagccactgttctggatcagggcctcagtcttgaattttcactgatgtctgtcagcacccagtgtgtaaattcccacccttttactgcctcgtctggggttgtggtgggcacattaaatacaacaggaatcctggtgcccttcctccttggctcacctcctgttgcttacctggaagaagttccttaactcctccctccatggtggacttctgcaacccagccagattctgctgggctcgcctgctgggagccctccctgcactcctcctcttgtagtgtgtctgcaatccagtagttccagaggcctctttgctcttagattctttttcttttctttttgcaatttattcattttatgtatgagtacactgtagctgttttgaggcacaccagaagagggcatcagatctcattacagcaaccatgtggttgctgggaattgaacttgggacctctggaaagggcagtcagtgctcttaactgctgagcagttgctccagcctccagattctgtttcttaagtacatactttagagctcaggcagagtctcaggactgtcttttatcactgacaaggactgagattgcttggtcccagtccctctcgatgctggtaaggcaacagaaatcgaccaaggtactaaaaagagcctgtctatccaggtgtggtcctcagagtgctttcatggtgtctcctgttgcctggaaacatcagagaggcctaaaatcctttgtgggaaataggtcaatcaaagggtggcaggtgctagggtttatggtggtgcaaatcccctccaaatcttgcactgtggtgcagttctttgaagaagcagaagcagactatgttgggaaataactgcatgtttgtgtctttagttcgtcctgtgtttatctgcagtgtttcctgattggctccctgtgttgggtaaaggctgctgggatggaactggagggaagtagttagaaattgtagtcccccccccatgcactcatcccttcccttctgtaatcttctgattcacaagttagaagggctgagctcacagcttatggcttaagaaggtgttcttcaaatagtatacttaaaagacatcctcagtccgtccccaccagcacataaggattctttgcttaaacacacctgcccctgagctagcctggtgcataggcctgtaatgcgagcacttgaaatgcaagcaagaggggctgaagttcagggccatcctcagctacatagtgagttccatgccagcctaaaactgatatttgggaggatgagggagagatgcatgattctcataacgttctgacaaccagagtttcctggttagagtaactactgctgcgatggaacactgtaagcaaaagcagcttgggaggaaagggtttatccggctcactcttctacataatagtccatcattgaagacagttgagagaaacttaagacagggcaggaacagaggcaggagctgatgcagaggccacggagggatactgcttactggcttgctctccatggcttgctcagcctcctttcttatagaacccaggactaccagcctagggatggcaccacccacaataggttgggctctcccctatcaattactaattaagagaatgccctacaggcttgcctacagtcagatttccttaactgaggttttccttaactgaggttcccttctctcagatgactttagcttgtgtcaagttgacataaaactgtccagcacacaggggaaagtgatggacacctctttgaagggtgtcagagaaccaggaacaaatctgacaagaaagagcaggccaagaccagctcagagaagacctgtttccagggcctctcccagcttctccatgtttgtaactggaagggcctctggggtcaggatcacagctttactgggagaggcgttggattaaacagaagaatggaatttccctttgataaggaaaagccaaaaattaataaatcagctgattttgttgttgtagttcctatggtttccttttctgtacaagtattttttttactgagaaattacataacaagacattaacatttgcagagtacaaattatcagctgattatttttagacccagttcagataagaacttcacttggctcggttgtagctctcactgacctgggagaaggtgggacaccccactgcacatcgagactttcttagcccctcctttaaggaatgctgggtgaaagtttaggactactgtatctgctcacttggcaggagagggtcctgtgtatcccaggatgccgtgtacccactctgtagccaagtgacacgagcacttgatcctcctacctccaccgcttcagtgctgggatgacaggagtacaggacctagagtatgtggactgggaatccaactcaggaacttacacatggcaggcaaacaccctaacaaccaagccatatccccagccaatctgcaaacttgtattggcctagccgcatgagagaattcagagctttgcagaagacagattcagtttgaggtgagggagcagcacacagggtcaagtggaataagagcctctgaagttcagtggcagggagcctcaaaggaatatagtaagtctccttgggatttgctcatagccgctccacacatgctgctcttacagaagacctgagtgtggttcctcgcaccctcctctggcagtgcactgtgtctttaactccagctctgtggacctggtgcccacttttagcctccttggacacagacagatacacatatgcacatcacttaaaataaaaacacctttcttaaattggtaacttaaaactgactgctctattacttaggacttgattttatatttttgagattaagtctcattgtgctagccttgaactctcagggatccttctgcctctgccttcaaagtgctaggattacaggcatgagccaccaaacccaataatatgtttctccaatgagaaaggtcatagtacagcaggaggtagttccttccgtatgaatccagccattaagtcattatcttaaagaccagaaatacgctttgcttagaagaacaaacaaaagccatatctgaagatgagcacacatcgagtgtgagactcagtaacacagtcctgagtgactgcgctgaccatactgggacatgtgaacacttcccaacagggaagactggaaatgtctatgcaaaataggattgccaaagccatctgaccctcatacaaatacagtggggccaatcaaacaaggacttggtcctttcagtgagaccatggcttcctgaggcaaaacccaatcaagtttgagatgacaaacagaaaagttagtttaaaaattactgcccgctagagaaagctgttaagcttcataccagaaagctactgtcaggttctgtgccctgcttataaaaggcacccattaaaaacaaaaatgtaagtaccgtatgttgaaatagactgcatttgctaccccaagacatactttgtcagagagatcctgttgggaaaccttgtggtgagtgctgtagtgggtgtggaagcaccaacggtagctgtcagtcccagatgtgcaccagagtgacctgggtcactttaaagctagacatgctttgcgaaagttccccaatgagtttcccatgctccctgggctgagaaccactgtagggaaggaatgctgtgttatctctgcagttgttcataataaaaaattgtgtactcctccctccagcctcttgttcctcctagaggccccctcactggtcactaggttctgatgcacagaggggagggtgggacctccaagaagtagaggctggtcttgttaattctctgctacatctaagacttaaaagagcccaagaactgtatgtggtgagcatctacactgtggaaggcccctctgtatgcctgccctgcctgccctgcctgccctgccctgccctgccctgccctgcctgcctgccctgcctgcctgcatgccctgcctgcctgtctgccctgcctgtctgccctgcctgcctgccctgcctgccctgcctgcctgccctccttgcctgcctgcatgccctgcctgccctgcctgcctgccctgccctgcctgcctgccctccttgcctgcctgcctgccctccttgcctgcctgcctgccctgcctgcctgccctgccctgccctgccctgccccgccctgccccgccctgcctgcctctctgccctgccctccctgccctgcctgcctctctgccctgcctctctgccttgccctgcctgcctgccctaccctgcctgccctaccctgcctgccctgcctgcctgcctgccctgccctgccctgccctgccccgccctgccccgccctgcctgcctctctgccctgccctccctgccctgcctgcctctctgccctgcctctctgccttgccctgcctgcctgccctaccctgcctgccctgcctgcctgcctgccctgcctgtctgcatcatttgatcatgtttgttcattcttctgaatgcaccatgatgaatgatgttcctttaccctactgggaagtattaagccagcatcagctgcacttcacttagaactgcagaccctgcctacccagtcataaacccagcaaactctgggagagttcttcggagtatgactgtgccagaacacagagcagattatcttgtcagcttctgaacaagccagaaatctgcataacctgagaccagcagaatccactcctcttaggaccatgtgtgtgtgcttgagggctgcggttcccaaaatccctgcatcagcaactgctagaggggtggcttcctcagtgagaactgcgtctgtgctttggccaggcatgatggctcacacctgtgattctagcatttgggaggctgaagcgggagaattgtcacaatgtatagccagctgggtatgcataccaagatctaggccaacaaggaccttttagggataatccaaacagtcgtgcttgggctaaatcttttttgtagagggcttgcctagcatgtatcaagccctaacacttcaggcgctaacagtgtgtaatccagggatggtggtgccgtcggatggattagggtcatcttcagctctgtgaaacctgagaccttatcaaagaaattagataattaattggttaattaactaaaacagagtactactgatccctccaggggagccacacttaggctccaggaattctgcctgggccacagaggtgataaaggtgcttgcttcacaaacctgaatctgatccctggaacccatgtaaacatgaactttgagagtcaactccactggtgtctgactctcaacatggtaacaagtgaagtgacatctgaggaaagtggacttgtgctgtatctctttctgtccccactgttgcccagcataggaacagtttgatgcttttctaccacgtggacagacctgaagcacaatgcttggatgtcatggatatgccttccagctcttctcacctcgctctcctactagagcggatggtttttaaagaattcttttgtttaacttgagtgtgtgtgcacacatgtgcgtgtacacacacacacatacacacactgtgcctgtagaagctaaaaaatgatatcagctctacatccagggcatctgatgtggatgctggcacctgaactcggattatctcaagaacagcaaatgctcttacccactgagtcatctctacactcccctgaaaggcagttttaacttttctcagtagtacccattacactcttgttagtccttcttccacttttatgttttctttacccatcttagctggattactattgctatgataaaacatcgtcaccaaaagcaagttggggaggaaaggttttattttattgaacttacacttctatatcactatataactaagttaagacagagattctcacagggcaggaacctggagctaatgcagaggccatgctgcctatcggcttgcctcctcatagcttgctcaacctaccttcttacagaacccaggaaagaccacaatgggctgggccctccccatcgataactaattaagaaaatcccttacagctggatcttctacagctggaggaaggtattttctcagttatggtccctccttcccagtgactctagcttgtgtaaagttgacctaagactaaccagcccattacctatcatttcattggtaacttggagcaaataatttaacctctctcttgacttacctgtaaaaaaggaatagtaataatggtgctgccttattcatgcattgttaaatgggtagaggaatgcccaacagtgtccattttaaaagtaattttaattcataatgttaaataatacatgtaaactattttatagtgataaaatagtacatgatacatgatatgcacattggctcctataattgattcactagcaattttagaacagtagacatttgagactttttatagttgcctttgaatattgcgtacatggctttattttcctttagtcttaaggctcttctataatagatagttctccttgtcaagctaaatctttgtgtgtcccagagtactcagtgcatcaactccattggcatggaagaacaggtgtctgtacacaagggactttcccaaacgtattcccctcccagcatcctggagagagcaagctgctcctgcgtgccccacctggagttcaggagaccatactctacctggaacatccctacacataacacaccactcagaaatgagccaagcagttctgcgttttaattacatttgggtttattggtttggtatgtttttctgaaatagagtctttctgtgtagcctacgctggcctgaaccttgctatcaccctgcctcagcctccagcctgttggaatcataggcaaacaccaccagcttggctcttatgacttttattttatttattatttcatgcgtatgaatgtttttcttgcatatatgtatgtgcactacataagtgcccggtgcccttgaaggtcagaaggtattgggttccttggaccttaagttgcaaatggttgtgagccacaatgactgtaggtgctgggaaccaagcctgggtcctctgcatgagcagctcctgctcgtgctctctaagctgtctcacgagccatgtttctgacttctgtttagtgaaatgttgtccttatagtgcagtgggtgaagagggtaggattatcctgccagtttactaaaggacatagttctaccttacttcacatgcacccaaagccagttcgtgcctgaccatcccttccatccttcattcctgggtatactgagactacatatgaatagactttcttttttaaatcttcacaactaaaaaacagaacataaaacttaacaggtaaacacggggtatacgaattataccaacagagagaacaggctgacctaagtcccgaatacaaggcagctcccctctcagtaattatagaagagggttgtggcttttactaactctggatcaggatctaacagcaaggccagtagcctggtgtccagagcaagagaggttaatggccccgctggatgaataatgcaggatataagaatattctgtgttctaagttaagagagggtcagatctgcccatagcagtacaactagaacaggaaggggaattcccttgtgacggaaaggaagtagagattttcatctgaagaaaacagagtaaaataatgatgttcaggtgcctacagggttatcatgaagagggcagaactaggccagtgagtggagtcctagaaaaacctgtgtgacagttgtactaacagtgaaatgtgctgtctcctgagctgcaagtcaccacaggatccaacccagagcctctggtgcattacagggacccaagactgaggaagtctggacatttaccctgggcacttctggggcttcccagttaaggttactcggtttggatttgttgggtgtccagaagaagggcaggagcccattttctgagatggttcctattctcctgtatccttttctgggaaaaaaaaaaatcaagtgaaattactacttctttctctccacttttttacttctagctctggagagtcttggcttctgggaagatgtgagaagaattatcctggaatcagagctgattaaggggttcccctggaccttcaaggtgccaggcttgccccagtatctgcagagccttaccaaactagccatccctgaagtgtgggcgtcgcttgctgaagctaaagggcaggcgactgctgttcctctctccttctctcggcttctgaagtcttcctttcctgaagtgcgcttgctagccctagacaccttgctggaaagggcaaggtcctctgaacaggagcagaaggagccacttcctctgctctgcagtatgggagaggagcttctactgctggcgatgaaggaagaccaccccggatgtttctgcagggtaggtgctctgctgcactggcacccctctgtcccacagtttggaaaccaccagaaagatacaaatgaggagagcaagtcagacaaaagacagtagcttagaatcccaaagagcagggctctatacgttgcttggctttatgctttatgtatagaaagagccctaagatgccagtggtacttgtaaagatttagtggtcataggtcaagccactctgtctttaggaaagatcattgaaaattagctgtgggggtggagcgagagcactgtgggcactgcttgccacgcaagcctaaggaccacagttcagctctctacccgtggaaatgccagctgctatgccagcacgcaggggataaacatggagtccctgggagagctgcatggagacagactggccaaacagtgagctcccagggcactgggaaaccacagagaacggtgatgggaaacaaccgatgtcacctccattagctacacacagagtagagctcttcttcactcacacatctctttataggcagatggctacctgagaagtttagtccaaatgaacatgaactctcagatatgaaggaggctggggcacaagaccaaaggtccaaaggtagcctgagtccttagtgagaccccgtctcaaaactaagtagtaggaaaagggaggaaggaaatctgcttgctttagcatgtgtgagaccatacaggcttctagctttgatgttaggtcaccaaggaccctcaaacttctcattgttctaccctgactcagtttctctaagatgttagaaaggaaagaagaagtcagtgaaatttgggggccttctgaaaatagattcccccttccttgttgttaaaagtgatcttgatttaggagcacaagacttttgcctatgagtttccttatcgtattttctttgatttgacttgtaggtcctaaagattctctatcacttgaaccccagcgaatggcttccccagacagagtgctatgctcacctctccccaaaggagttcctcatgtggagtatggatattgcttccaatgacaggtgtgccctagggcttttgcgcagtcgtggcagactacacctcttcagtcatcaggcagggtgcctgctcactgcgctccctgagagctcagatactgagcttcattctaagcctcagcctaggagctgggttctaaactctactaagaaaagtggcaggttttcacactagtaatcaaaaagtacaagcagttgtgcatgcagggaaagaattcacacctacaaaggtcatagactagccacataaacatttgtgcataaaatatgttaagtttgggcctggggatatagctcagttggctaagtgcttatctagcatcagcaaagccctagctgaggcctggtaccacgggtagcactgacccataatcccagtacagaagaggtggagatgagagggtcagaagctcatggtcagccttgcctacatagtgaccctgtctcatcttaactgtagacttgtgtatgtggtaattagtgaggatttgtgagtgtgcatatgcctgtgtgttaattttgttctattttccagatctgaaatccagggagtagctctgaagcttgcctctaaaataattgcctaccgtgtacagagttgcgagaaggtgaggctaattctgtacctgtcctgaggtctggggttttacacagagcgtgttagtaaaatgttaacagccccagcagacagaatcatagtgactccatagaaatgtggcttgtgctgaagtttgcaaagactctgaactttctctttcttctctcttgttttagccatttctgactagaagcctctcagagtgacagtccccaacatacatatgctgattgtttcctccccatttctgtagctagactgtattttaagaggagtaagcaagtcagttctgagaatatttaagattacaatttataagctagtaagtctgatgatatattacacaggctgaaggtgaggtaggtgccctgcctactatgtggctgagctgtatctgaaccaggtcctatgtgtgctctacctgttccacatgccctttgaaggtgaaatggagccaaaggaagcaaagcagcttcgtgggaagatgctgtgagacagatacatacatacctaggtgtgtatgagaggcataggaccaaggctcataaacttgctgaagaggggaaaaaagaatgtaagagccacaagacacggagaaggcagggaactcccattctccagacacaacacatcagtataacccccagtagctatgtttacttataccatgtccgcataacaggtcctctcagcagtccagtcatggatgggggagggactctgtcccttgaatcatgggatctgaggactaatggactttgagaaagtaggctgattttaagttgtgtaagcactactgaacccaccagactccagtggagagtttgagtactaagaccacacagatggaactaatcaaacccaggggaatgcaaagaaaacaaagcacaggtgtgagagagtggcagggaagaagggacagcacaggacatggaaggagattggggggggggggggcgggaagaatgcattatatatgtctataaaattaaaaagaacacatcttatttaaaaaggcagacaataccatctcaggatagtaagtagacagtggccagtctgcagtacaagcacctcttctcattgtgctcctgggtcctgcatgatcacagggatgccagcaccaagacacatcctggagattcagagatgcacaggctatggagagaaagagactgctgggccactgtggcaaatggcaggactcagaacccaaggggaagaagtgaatgcttggcggcaagatcagattgcccaagactgggccagggtaaaaccctggggttagcattagcaagcaagattccttgactctgtcattcaaaggcatgaccagagatcaaacctaggtcacaggagatacaaaaatgtttaaaataagtaagtaaaaaagaagaaaacagtgtttggaagggtaagagaaatatgctgagacatgattgttttaaaacaattcagaggtctggcatgcacaagttccttccccagcactacaacaaaacagaagcctacctgtcattccagaagaccagagagagcacagccacacagagagatgctgtcgtaggacacaaacagcagcagcaaaccactataaaccccaggttctaaggcagcagtctagacagcagaagctcccagagagaccagtctacagcacacttcaccatttgcctccatagccagctgcttggaccgtgaatgaagtattatcccataaaactggaaacattttctagggagagaaaaatccacagagcaatagatggacatggaaaaacacagaagctatggggcgggagctggcatcagcagctgagaacctcagttcagatccatagagccattgccccagagcaatcaaagaaatcagcaggctcatgtggtacaggtagacagtcaactccctgtaagtgtcttggaatactgctctctggttctcttatgggggacatcatgaatgaaagacatttctttctcccacttttgagacttcccagagacggccttttcactgcttaataagactgcaggcatggcagagtgtggcacgtggtgagaaggtatgaagaaagggagcagacaggcaaacagatgggagaattcacttgtgcatcagagccgctcctgtcatgattagcccagcctggagtcagtagcattcatttatccgtgaatgttatgaggccccactctcatgacttcatacagcatgtcaccacagcagcttgatttcaacatgacctccaaagtgtaccaggaagtaatttgcatggaatgagaatctcctttctaggaaaagtgagaaatgagtataagcgctaaaaataaaccaaatgccacaactcggagtacaatattatttgaccttgaaaaggaataaataaagcttagaacccttaatctgctgggtgtggtgctatatacttgtaatcccagcacgtgggaggtagaaggcggaagaattgagagttcatggccagcctgtgctatatgagacccttctagaagaaaggaaaccatcagtgtaaaaaagaagctgctcacagaaagaaaaccacagagactgaggcagagccgcagagccagagaatacagggtcagggctaaagggaccgaggatggggagtggcaggaagatgacaacagaagagaagttgctgtgtttactctgaccctgacatcacacaacacacaagtcagcagcgtcacggagtaccacagacaccttcaccttaggtgtcagtcagagttgcaaaagaaaagtgtgcatcatgtaccaataaagctcttgttactggctgcctccctccctcccccttccctccctgtcgctttccctcctccccctctcttggctagtaccctttctctcacttgccactcccccttctctctaccatggtgacttctctggcctcagtccttggggccagtgaactgcctgcccaacagtggcttcccaataaacctgcatttaatataaataaatgagttcttgttgctgcaaacagggctttgctccaagtggtcactggaaagttgctgtttcctggggctgcaggtgcagcttgatagagcccttccctccttttgtgttctcagaacaaagattcactcgcccctgagctgaggcagtgggtccagctggttgtctggtcctgtggagaccatcttcctactgcatctagactggctgttgctgaagtcctcacaagcaccgcacccctgttcctcaccagtccccagcccattctcggtaagtgtgctaatcgaggcccccgcacccaactcagcaaacagaggaagagacacacattccaggctaaaagaaggggtgcttagctgggtgctggtggtgcatatctttaatcccagcactcaggaggcagaggtaagaagatctatgagtttgaagccagcctggtctaagagcaagttccaggatagccagagctacacagggctaaaaccttatcttgagggggcagggaatgatgtcatatgtgatgcctttacatgtttccagggtgttttctctgcatggtttatattatgagtatttcttaacaatggctgcttttcttctttttcttctgtcttatcacccaagccattctacatacattttatcagagcacccatgaactttgcagtctttcctatctgtaaatctgacccttttggtagtccattactaaaacccatcatttgagacagtgtcactatgtagcccaggagaaccttgaacttgagatattcctcctgtttcagcctcctgagtactgggattctcagtggacaccaacatgctcatgagtgggttccttacgtctcaggctagacctacacacccttaacatggctcactaggccctttctgtttcatccctggcctaccctactgcctcatcatctgctgtttgtcctcagtagggaccagctctccataaacaacccctgcatgattgacttgtttgcctttcaaaactccacctcttccaggaagccagaaaggacttccttaaaagacgccaggaagtactttccagtagtctctgtggtgctaaggctgacttgaggcttctgtctgatgtccctgctgggctgctgggtcccctcactactgaacttagcttgaaatcagtcatgggatagaaagggcactgcttcagtcagggttgtgcagctctcagctgacttctgaactgggttcctccctcctcgctctcactcccatacctagagagcagtaactaggaaaagcttcacaccagcaatactgaggagagaggaaagccttggaggatgaagagcacaggggtacttgcgtaacttttgtattgtgctgctttggagcttgttttgatttataaacatagttaatggaaaaccaggagcacagagccagctccatacagaccctgccctcttctgcatgtggacttactatgaggagctcactcccatcgctagtcactgtcggtctcgctctgcttcgtccacgcttgccctcaagaatcaggtagggccagccccaaggagccgaggaaagaattgtttttaggtgttgacactgaagtggaagcatgaacctatgaaggtccttgtgatcaggtccacggagtgcctggtgcagcctttgtcatccgcaaccgtcctgttacaacttaactgctgaaccgagagcaataggagaaaggctaacaagctttggttagggcaggcacggtgggtggtccatgcctgcacctcgagctgcttgaaagagcaaagccagcctagacaacgtggtggtaaaacttctctctcagaggcagctcgttctcctcttgggtcaagcattctcaggaagggcaataccatcttgcagcacattttcctgaacaactggttgctctgacactcaagtaaaatgtgtgtaaaatgacctgaaattgttgtgtggaattgagtcttgttcgtgttagctgctggtcctggggatgccatggtcagcaaaggccagtggcccacatacacatgaagaactgcaaccagccaggttgaagtggactgaacagagcaactttaggggttcaaaggcccttctttgtaagacaaaactcaagatggattccttggtgtcacatgcctgaagttacagcctttgggaagtatgagcaggaggattttagtagttcaaggccatctaaggctaggagcaaatctgaggccagcctggacggctagtaacccagtctcaaaagttaaaaaataaaagtgtaccgtctctaaggaggagtagaggctaaagcctgctctgcgaggagggagagagctactccaggtggcactgatggggggaggggagccactcagaccattgcctttacaggcatgggtggtattttgtcactgcctgttgcctctctctctctctgttcctgaaatatgtccctgtagcccgttcccatgtcttcctgcagccactgggcttgactctgacctctcattaatctacattctagatgtcttacccttggtgctgctcggagcaccttctgcccttccatctgtccatagcagcactacatggtaacctgcagatttaatgctaagagccaacagtggcagaaatgggccccagagacatgaaactaagggtggccccttttccatgtgtcttccccacttgtgattcttgtccccaaacacattgacactttgctttccagaattggtaagttctcacagtctcttaaatcagcattaaactcgtttctgcaaagtgcaaagcacatgttgttttgttttgtttgtttgtttgttttgagacaaggtctcgccatataactcaagccggccttgaattcactgcatagccaaggctgggattactagttagtgcccccagccttcagttgttttttctccctgacacagggtctcattatatagccctggctatcctggaactctatatgtagacctctggccttgatctcacagacatctacctgttttctaagtgctgagattcaagacatgagaaacattctcactgcgtaaatcatgactctggagagagcccagagccttataggccgtcagcccctctgcagtgcccagtgcaggctggtcgactacagaggcttccctcctccctccccagcagggtcctttctgtttgttctgatcctcaggtcttcttgtcttacaataacaccctacatcccaaaaagaatgtctgtcgcttcttcatgaatgtctccccacacatgagcctggagcagcgtcactgcatgcttggtggtggtactgcagatgacatgaattcattccctctggtttcttcacagaactgcagggcacactttctctctggaggtgtgttcttacccttctgcagagtgaggagcaaaccgtcagagaggcagccacagaaatcgtgacaacagccatgtcacaaggaaacacttgccagtcaacaggtactttgttcttcaccttgtatcatattccttattgctccataaccaggactggcaaacttaccagaagatgccatataatggatataagttttgcctaaccatttagccttttcctcatccttaccattgtcatgggaaacagccctgaaaagccacaaggcattgtgatgctataggacaaagtattctttagcactagaaataggaggaaaggataggactgttacagtcggtgggaccaagatgaagtgcccaggctttagcttgatctttccacagcagttcaactgttgggagccctcctccttcacacagtgccattgacaccaagcacttactctactccctcaccatagcaccttctcctgccccacacatagctgccttctgtggagatttgtagtaggaactggtgattctggaaggcccaaaagaaatttaactcagggtactggtaaagatggtttagtggttacgagcaccaactcttccagaggacatgggtttgattcccagctaaacagtcatacacgagagagagagagagagagagagagagagagagagagagagagagagagagagagaaggaagaagaagaagaagaaggaggaggaggaggaggaggaggaggaagaggaagagagagagaaggaaggaagaaagaaagaaagaaagaaagaaagaaagaaagaaagaaagaaagaaagaaagaagtatgaatgagtatgtgttctcactctgtagcccagaccagcctggaattcctccacagcccaggctgatgacaaacttggtaatcctgctccagtctcccagttgctgtgcagagtaggatttttgtctttgttcactgctctaatttttagaacctggcatccactaagcatcagtgtgtaatgacttgaatgagtgaataataaggacttggggttttcaacaactgaccgtgtgtgggagagacggaggtaaagtcctctggattctaaactgttaagaaattgccctatggagctctgtgagttcgagaccagcaggtctacatagggaattctagaacagccagggctaggaagaaagaaagttggagctggagagatggctcaagtggttaacagcaccggctgctcttcctgaggttaagagttcaattcccagcaaccacatgatggttcacaaccatctgtaatggggtttgatgcccccttctggtgtgtctgaagtggtggctacagtgtactcacacacataaaataaatctgagggagagggagagagaccttaaagtgggagatccgagttctagcagatcatgtaagctgcattaggcctactgcttcctagaaatcctaatttgataagaaactgcgtgtgcatctgcgcagtccctacctctgacagacctaggtttaattgctctctcccttgtcattccctcctttctcaagcaggatggatttttttttcctttaagatttgttagcagcggcggtgcacgcctttaatcccagccctcgtaagacagaggcagacagatctctaagtttgaggccagcgtagtctacggagagagttccaggacagccagggagggctacatagagaaccctatcttaaaaaatgaaaaaaggtttatttatgaggatgaagagaacactcactggttgctcgtctagagatccatcattcagcttccagcacccccatggtggctcaaactgtctacaggtccagttccagaggatctggacaccatcttctgccctctgagagtactgcacacacatggtgcacaaacatatatgcaggcaaaacacccatataaataagaataaaatttaaaaattaaagttaatatttatttataaataaataatatcctgtgcaaaaacagccagtgcttttaactactaagccctctctccagccccccagggtggaggttcattcatgcctgccaccctggggaggcggagcttagggactaaggacacatcctcctggggactgcaatggtctaggactgcgtgacagcacaggggacagtggagattttctcaactgtcatggtggttttttttttctttgttttgggcttttttgagatgtttctcttgtagtccaggttggcttcaggttctctgtgtagcccaggatgaagtcctgatcctctgccttccactttcacaatgctaggattatagtatgtgccgacataaccaaactccactagcatgtttgatagaagacactgaagttgttgctgagaaagtagattgggggccatagagccgaggcaaatgagagttatggtagggtggtgtcccttcctggaagagcagatggtcctgcaccaaaggctgctgtgttcctgccctctgggtcccttcttagagggaggggatcacatagggctggaggagtcccagcctgtgatctacagctagggctctaagagcacaggcaggtaaatggccctgaatcccactgttagtgggagggcaggtctgaaacagggccctcattgagcccaggaaagcatttcactcaccttccagacaccttaattctcatggaggaagtgacagaaatgtaagtatgacctcaaagaccagtgtagactcctgggacaaatgagccgagccacaagaagaatgctgcctggaagagagtttggtgggactccagaagcactggaaggacagtgttctatgaagccagtatctcctccatataaccaccccaaggccagctctgcgcctgctccattgccctcgggtgttcttttctattgtcagaaagatcagaattgtgatctgccagggaaggaatggtttctgtttcctcattcatttcttcaagtcacagacatcttgtcaaggtagacaaaagtctctaccccttccacaatcccctctaggggattgtcacagtgaagctccaatgaccacataccactttgcccttgctagctgtcactgttcccagggagcctcgtcccctgacatctacctgcactcagccagtgctgtacagaaaccaatgcaagctaatgttcacatctaagtctaggagtgggttgcagggcccacaagtactctagctgagccttgttgctggggtggtgatactgtcttcatggtctcccagtgactatgccccaaacagacaacaagaagcccnnnnnnnnnnnnnnnnnnnnagagccattttgaatcattttgcctccactgatcctcactggcccccaggtgactgacttctgtgggtggttgtcttagttagggttttactgctgtgaacagacaccatgaccaaggcaagtcttataaaaacaacatttaattggggctggcttacaggttcagaggttcagtccattatcatcaaggtgggagcatggcagtatccaggcaggcatggtgcaggcagagcgagagttctacgtcttcatccaaaggctgctagtggaagactgacttccaggcaagtagggtgaggatcttatacccacacccacagtgacacacccattccaaccaggtcacacctattccaaaaaggccacaccttcagatggtaccactccctggtccaaggatatacaaaccatcacagtggtgataagcccttggtctagggcctaggccatctggtgctgatgcagcaggcagggtctccctgtccctcttagcaaaaggtagctgtgcctgatgactactccttctcatggctcagccctctttcctggcttcccttctatgtggaagcctccacttgcaatgctagggctacataggatgcagcatttctcagttcactagggaaagcaccttttgcatgtgtgttcgtctgtttgcaggtatgggactgtccacagttctttttgagacagtctttcactggcagcatgggagcacggggcttacttgattgatccagactggccactgagccccaagggtctgtctctccctaagccccaatgccacgattacagggatgtgagttctgtggctcaaactgagatcctcgtgttcgttctcgtgacaagcactttgctggctgagccatttcccaagccatcctatttgaccctaagctgcatgagaaaagtaaaggcgctaggctttggttagatgactgcggaaggagtttactggtgagcaactctccctcagttcctactcaaggcctgtacattccatggagcactggtgagtggctgggggtgtgagggtgtgtctgtctgtctgtctgtctgtctgtctgtctcattggcccctagttcatccagccccagacatcttctaccaatacaaacaatacaagttgtcaaatccatgctgttgtgacactatatagcctgaagggtaggtctgcataggccactaatgaagccccttgttctaccactgtccaagtaagagtataggggctgtctgagacctgggaaaccctcatccttcccataacatcttctgaatcctgttctgagagctcctgtttggagtaggctagcctaggctttcttgttccacatgacaggagctcttcaaagcagaacagaatggaaagtggctgttactgtgtttgctgcaaagaggaattttacctgggcccatgctgggagactgtgtgtgcaatcagacagagtgctgtgttgtaaatctaatgcctctcagggtttctaaaaagagcacaggacagcagttgggcacgtctttatgtgtgacactggaaaagaccgtatcctaggagctgtgctttggccagctctctgaggcaacaagtgtccagtgtgtctaaagggcagggaatcttcagtgagtatactgacagagcttgtcaaaatgaacgggtgtggtggcacatgactttaatcccagtacttgggaggtggaaataggcagatctttgaattccaggccagctacatggtgagaccctgcctttaaaagaaacaaaatgaagcttgtcttgaggaccaaaggcagagaacaggaggtgagaatccaaagctgacctcgacactgccttctcttctcctttgatcttgccccccacacacacacacacctctagcaggagtacccacagtaccagagtgtagggcatgtgtggacagggattccagcttcaagcatgaaacaaaccactagtgtctgcagcatggagaccacgtttgtagttgcttaaacaagtcagtagcttttctccctaactcagaatacccagcaggcttgtgtggtggccctgtcatcaagggacccacaccttatttcccactgctctacatttgcagttgtactgtccctcttgtcttctaagacggtaggtccagcctcactcccatgtgcactgtctagtgacaggaggaagggaaggccactgtaggtgctgcatctccttcaacatcaaccttagcagccaggagctgctcgtggtctgcagctctcacaagaggcccaggactgttgatttgagccaagtagcaacatgctcagctaagacgttccccgtctacatggtaggggatgggcatggaagagagatgcatacttcccacttccatcctctagttctgacatgctctaatactgcagagggctagctgcattcacactggcagctgggggctcannnnnnnnnnnnnnnnnnnntgtgtgtgcaatcagacagagtgctgtgttgtaaatctaatgcctctcagggtctctaaaaagagcacaggacagcagttgggcacgtctttatgtgtgacactggagaagaccgtatcctaggagctgtgctttggccagctctctgaggcaacaagtgtcctcattgagctcaggaaagcatgacagggattccagcttcaagcatgaaacaaaccactagtgtctgcagcatggagaccacgtttgtagttgcttaaacaagtcagtagcttttctccctaactcagaatacccaggaggcttgtgtggtggccctgtcatcaagggacccacaccttatttcccactgctctacatttgcagttgtactgtccctcttgtcttctaagacggtaggtccagcctcactcccatgtgcactgtctagtgacaggaggaagggaaggccactgtaggtgctgcatctcctccaatatcaaccttagcagccaggagctgctcgtggtctgcagctctcacaagaggcccaggactgttgatttgagccaagtagcaacatgctcagctaagacgttccccgtctacatggtaggggatgggcatggaagagagatgcatacttcccacttccatcctctagttctgacatgctctaatactgcagagggctagctgcattcacactggcagctgggggctcacatttgaatggtactgagcccctggccttggttatttagaaccctgctcatcattcccagacagattttacctcgcttgcatccatgttgcttttatcatcgcaactcacagagccaagtatacgagaaaagatggatgaattgtctctgtcctcataaatgagaatatgggccagatggtagtgacacacacatttaatcccagtacttgagaggcagaggcaggtggatatctgtgagtttgaggccagcttggtttatagagcgagttctaggatagccagggctacacagaaatcctgtctcaaaattaaaaaaataaaataaaatcaagtgaatgtggatccgtgtgacattttagccccatccattgcctgaaatgtaaaggcttacttagaagacaagcacacacaccttgcaattacaatcaccatatcgttagaagtgatgggaagagaagtgactgggtgacagcacctagtagaggctaaagaataaagacatgcaggagggatatggcagagtgacactgtggaaagacccaagaatgggtagagtcccaggtccttttagagtcaccctgcctatacctacttcatgtctgtgggagtgttgtcatggcctgtgctaagtcagcccattagtcttaggttcctaaggcctagccagctccttggacctccttttccacatggccttttggacatcagaactcagacgactttggtcacacccaccttcttcagttctggtgtttgttggtcaggagtctcatcggctcacccacaccagaagctttttaaggatagagattttcaggatagagaatatcttgcatcagcaaggtagctgacaggttagcacctagagtggcttgcatcagactgtgacctggtttctgtagctctctttggttgtggaaaggcaggtggatctggacctcagggtggtgggctttcctgtgcagcctcccttgtgagccataatgagccttgcaggcttaggtcaggtcacactggtacttcagtcctgtcagaccagaaagtaagagtcctcagtgttataagcctttgccactaggccaccatgatgtaattcctctgacctctccagccagggaaatgatggggaggcctgtttgatagtccacactctactttatacttacaaaatgcacatagaaatcattggctctgcactcccagggctcaggatgtgtcatgtgcagtgtcgcccttaggctctgcctctagcccttcctcgcccttcaggagttataagtaagagactgagccaaacataagtaggcttctggccaaaaattggatttgactgagaaactagcaggaatatttttctggtggctcatctccttcctgtctaccctacctaccaacctagaagagatctaggaatcccctgaccttccaccgtggctacaagcagtcccagctttctttaacaggcctgtccataaatctcccttgtttctcatctttgaagaagccgctctgtcagggagttcttactcaagtgtgaggggagggaaaggccactagtttcagactgcaagttcttttcactccatttcacaatatccatttcccagaaaccacaggtttttgttttgggtttgtttggtttttttttttaaatgagtacccagtaggcaggatgcccaacgcacagcctgctagattcaaggccaaccacctggagagaaaaggagtcggtcacagggtttgcctgtggtggggctgcctctcaccacggaaaatagggacttaaactcccactatttgtagtttgcagtggtggacttagtgggttgggaggcttgaagagacaagaatgatatttgaaattcaaggcttagtttaggatataacgttctggtgagcatcttagttccctgctaagtcaactacaggaaagatgaaaggaggctaaaatggagcaggtaaaaagagaaaggaagccgagagactcagctaaagaatggtcttcatgatttctctgtttctgtcagtctcccccctgacccccaaccctgaccccctgcctccaaacaggtccttctttgtatttctaactgtcttagaacctgtgatgagaccaggctggccttgaactcacagacatctgactacctctgcctcccaagtactgggattaaaggcgtgcaccaccatggccagccagtctttctgtctcttgaggggtttgtgcatgtgatgactagagtttgatattgactgtcttcctcaatcatgccccaccttatttaaataaagatcccaaatcagttatactggctcacctcaagaaatctcttatcgtgtctcccagctctgggatttcaggtaaatggcactgtacccagatttttacctgggtcccagggagccaggctatgttctcatgcttgcatgtagcactttaccagttgaacagtattcccagagcccacatgctggcttactttctttctttttttttttttttttttttttttttaaaggatttatttattatatgtaagtacactgtagctatcttcagacactccagaagagggcatcagatcttgttacagatggttgtgagccaccatgtggttgctgggatttgaactccggaccttcggaagagcagtcgggtgctcttacccattgagccatctcaccagccccacatgctggctttccaacctctctgattggaaggaagaagacacagcatagagagtcttctcatgcggtagaaggaatgtgccaagaccctaaaaggatgccgtgggtttagtgtggtggagagtcatacgggatcaggtcaggagcatcttctgctacatagggaggttaaggtcagccttgtctcaaaaacaatggtaggagtgatcttaaaaaaataaatgttctacaaagtgtgtgtgtgtgtgtgtgtgtgtgtgtgtgtgtgtgtgtgtgtgtgtgtgtgtatgtgtgtgtgaagtgtacatggagatgagaaagggtatcagatcccttggactctaaggttagggggttggtttttgttattgaggattgaatctagggtcccctgtatccttgtcgacacctctaccgctgaactacatcccaggattccttttactttttattccgagacaagttctcattacagttgaactcactatgaagcagacaagctttaaaccagcagtccctctacctctgcttcttgaacatcttagattacaggcatggaccatcagatacagtttaggttttttaaaaggcaaaatctgatacagcatttggtaatcctgatatctgcatgtaatagacaagtcaaacaatgatttacagtgaggcagccagggctgactggcccccactctatcaggaggaacgcaaacattttctctttgccttactagcctggcgtgtcagatcccttaccaggttactgcttgggccaatatggctgttagaagcattaatcacgccagactcattgcacatgaggaggaggaatatcagagagcatgtacctttccctgtttaaggattctaccagagttctgtgacacatgtcacttacttcatcagcttccacttaatatcataaccatacgtaactacaaaggtgtgcaaagaactgggctgggcatattacctagagttaatctttctaaagggaacacatgcacacatgcaccattctgtccttttgatacaagagatgctccttaaatagcacagtctctgggaataaagagaagtgctgggcagtgggacacgcctttcatcccagccctccctcgggagggagacagatctcatccagcttggtctacagagcaagttccaggatagccaaggctacatagtgaaaccctgtctcagaaaaacaatggaaggaacgagggaaggagaaggggaagggaagggaaagggaaaaggaaagggaagggaaaggaaagggggaagggaaaggaaagggggaagggaaaagggaaagaagaaaggaaggaagggagagagagagagagagagagagagagagagagagagagagagagagaggtgcttaggactgttccgagtgagtagcagcaggaagaggttgtgttgcagatggtggaaatgcgctgctgatctcactgtctgcacagatcacaggctgatgcattgctctacaaagaaaacctttcacaggtctacagtgtggaaagaaagagagtaaggctgcagagatgaaagcccggtgggtaagctggtgttctaaaagacctgggttctagtccctgcacctatgtcaaggaaatctgatcccttctggcctcctctgatactaggaacacatctaatgcatacacacacatatatataagcaaaacacccacacacataaaacaaaataataaaataatgttttaaaggagaaagtaggtgtaggggagcaggtggctcagtggctcagcgttgcaaggccctagcagcagaagaaataaaaaggaaagagtaacatgagcaagcctcatagagaatacacacttgtaggataaagcacaccaacagctcagtttcagaattaagttgctcaattaagatggaagaatccctgtaagtacattataaagtatgaggtgtccctttataaatacctccaagagaagtctgactcgcaagagacaccgctgtggtttgtgaggtcctccatgttcaagggtccctggcaggcagagcttaaaagctgcaaggttacagggatcgccctgactcagcctgggcgttcagtagtcagagaattgctcaagggtggcctcagcaaactcacctgcagcgagcagctctaagagctctagtgtctctggagagcttgttactgctttgtcttcattcttattatgtttattttgtgtgtgcatatgcttgcgtatgtgcaagtgtgtaccaagacacactcagagagctctgaggataacctgacagcatctgttgtcctcttccacccgtgggtcccaccaaccaaactcaagttgtcagtccttgttttgctttttgttttaaaatgtatgtgttacaggtattttgcctgtatgtatttgagtttgctgcattgtatgcctagtccctgtagagccagaagcaatgttggatcccctggaactgaattatagacaggtatacactacagttgacaccttaaacagtcacaggacatttacaacatttatactgtaggtttcaattcacaaaattaggatcttctttcattaccttctgaggaaattgcaagcacactggaaatttaaagtaaacatacgaaaaggaagcacgtttagtggcagagtattgcctggggcacctgaagccccgggcccattccccagcacctaaaatcaataaagagcttaaatgtagtaaaataccattcagatatctaagaaagtctgctaaatataccattattccaacaacaaaagaaaatcaggggctggctcagcaagtacagtgtctgctgcttaagcctgagaatctggatttcagatcccaagaacccaaattctggccacagtggtgagacacatctgtagcctcagagctcatgccgtgaggtaggaaacagagacaagtggatctccataaattcatggcctgctagcctggcatggtggcagacaacaaggacacagtggaaggaaagatagcacccagtgatctctgacctccacacatggggcatgagccatggcacgcaagcatgcacacaaaaataaagactcctttgaggctcaaatagttgaaaacaccatcagtactaaactaggtgagcaggcacagtatgggagcctgtagtccctgattatgggaggttcaggttgaaaggttacctgtgcccaggagttcaaaaccaatctgggcaacatggtaggaccctatctccaacaacaaggtttaaatatgtgaagctcttcttagaggaaacacttgtaatatatgttatacagaatatacaaagatgtcatctttttaaaaaaaagtaaatgaaaatgatagaaaaagattcatcaagggattggggagatggctcagtcagtgtagcatgtttactgtgcaagcgtgagagcctgagttctgatccccagaactctgctaaaaagccaggagtgccagtgcccaccgataggcccagcactggaaaagtggagacagaagaatgccaggggctttcaggccaatcggtgagcaccaggctcattgagagactagagattctgcctcaggaaagatggtggaggaagctgtcaggatctcagcaggtgaaggtccttgccgctaagctcacctccctgagtttgatccttgagacacacagtgtaggagagcattcattcctgtaagttgtcctctaatgtccacacatgcacaacagcatgcacatgcatgcataaatacatacatacatgtgtatatgtataaataatagtaaaaaaaaaaatcaggtggagagcaatagaagacatctgacatcaacctctgcctctacacacacatacatcctctaagagaaagaccataaaaccaatctccttgtagaagtagatgtgaacagtacaaatgaaagaaaagaaccctgctttctccacagtaataataatgccaactaggacagcagcgctgtgccattccctgtatgttgataccgagtgaaaagattgcactctcccagatgcacggtcagacccagggggactgaaaatgctcacatttctagaggcatttcagtggtatttctggaaatttacagtgtataccaagtgagctgggactcaaacatttatgaatgtccctatagaaatagaattttagggctggtgagatggctcagtgtgtaagagcacccgactgctcttccgaaggtctggagttcaaatcccagcaaccacatggtggctcacaaccatctgtaacaagatctgacaccctcttctgaagtgtctgaagacagctacagtgtacttacatataataaataaataaatctttaaaaaaaaagaaatagaattttacacacatgtacaagggtatatctgagtttatgccttttaacagcgttttgtttagataatagcaactcaagtatacatcaaagaattacataaattgtaatcccttcatagaaggctgaaagtaaacatgatggagtggctattatgaactaacatgtcaaggcaccatgagatgctgctgctgctgctgctggggaaaggaacagagcatgctgggcatcatgctgcatgcctgtgagcctggcactcacaagtcagaggtctcaaatgaaggaggaggagccagtggggtagctcattgatttgccagcgagcttgacaagctgaatttgatcgcaggcccccacatggtagaaggacagaacagagtctcacaagtttcctgtgacttccacacacatgcatgtatcacatgtacacgccctcatacacacattcacatatgctcacaaaataaatgtaatttttttaatttaaaaaaagaaaatgaaagagttggaagtcaaaatccaaaatgattctagtttaagctctgataacagttatcagtgtgtattttgtgcgtgtagaaagctttactatacattcccatcccctctgcgtgaaggaacctagcaaagagtgcaaatggatggggtctgtagttgtcgaaggagtaaacagttggagccaattgtgaggtgtggtcttgccaggtttccctagccagcagccatgaatgaagactctctggactttgggattcttgcattcaccctatcaagtctctgttttagtctcaagccagcgtcttttgaccccttaacaaatttcagtggcccctgtcaccatcactgtgagtcctcagcaaagtgaacttgtcatgagcaattgaaggcagcctcctcgctttccttacctggtgagagcagcctagtcatgctgctcacaaagctctgaggtagccaagtgggacttaaactcctctctgaactctagaacttggggacagtgtttagttttagtgttgagggttctgttgcgctcccatcccttacttcctacctccatggagcatgttcctcagagtccagcaggaggccggtggagttaggttttagtttctggcgaggactggggatagaatactctcagctgaagagaagtctcagttctcaaagaccaagaggcaacaaagaggaccatggcaggaggtgtgtgatctgccctgccaccatcctgacttgatttctccacagcttagtaaaatgtcttagcaagatgctctactcactcataaacctcatcacctctgaccctcagtgtgagtactgcccggccgggtcactgtggcggtcactcagagtgttagggtctttcatgtattgtcagactgtgaataaaaatagaaacacacagttaaatttgaaaattgaactgtgagcaaccctgtgaagagcatgaccctgggttatttgggaattctgacagtgaacagtcaggactgatcgttacctaggattcaaatggagctcggtgtcctgtcctgtacccagcaccttctctctggaagcttccacagcagcagggagcattgtcagggtactgccaggccccacccctgacccccgccactccccccactcacctctctctttttttttttttttttggttttttgagacagggtttctctgtgtagccctggctgtcctagaactcactctgtagaccaggctggcctccaactcagatatccacctgcttctgcctcctgagtgctgggattaaagacgtgcgctaccacgcccggcctcacctctccttttttccctcattttgctctcactcccaattaaaatgtacatatgtgagtattgggtataattactagataaggttttgtgttaagggaatctaactttttgggagcatgctggctttttttttttttaataagtggccttcaattcatttttggccatttgagtcattgaccttcaccttgagcaggaaggaagactccatacccagggtgagcgcatgtgcagcccccagaacggatgccactgggaaggtgggagtgaatgagactgtaagggaggagagcagtgcccnnnnnnnnnnnnnnnnnnnnnnnnnnnnnnnnnnnnnnnnnnnnnnnnnnnnnnnnnnnnnnnnnnnnnnnnnnnnnnnnnnnnnnnnnnnnnnnnnnnnnnnnnnnnnnnnnnnnnnnnnnnnnnnnnnnnnnnnnnnnnnnnnnnnnnnnnnnnnnnnnnnnnnnnnnnnnnnnnnnnnnnnnnnnnnnnnnnnnnnnnnnnnnnnnnnnnnnnnnnnnnnnnnnnnnnnnnnnnnnnnccccctcccccagagaagtgcttcccatctggaaaggagagttttgcagagtggtgctgtcttggagaggacactgacctgcagtcagaagtcacttcccttctgacttagttggcatcattctgtggtgtcagtttcagcatctataagatggggtggtttcatatctcacggaacatctgcattaaaacacaaatacaaaacaagcattaaaagataaacagggttccatctccaatccaaatgctagatagtatctgttaatgctgaaagatagaaagcttttctatttgtttttaaactcctgtttatttgctaaattggaggtccttagcacatgatgggcatctctttttctctgttgtggatttagggacttctggatgctgttcttgtctctttcaggctgaagactaggtctgccctacagttcttgctatatttcagaagtgacttgatatttgtgatgacaccaaggtgtctttttactctaacggaggcactggggtgaactgagtgccattcctgccaaacagccttattacccagagaatctgacagcagttctcttgcctttgatggcaatgaaatgaccacctgactccgaagcccaaggctttctgctgaaccgagtcttacacagctggttagtgctccacttcactggaaacagagtgaggttgagtacccacggtgcctactgtgtgtgggaatccaaaggtgagaggcacagcatttcagctcccatactgggctcatctggacatcctcttgattccagggtctcagtgtggcagagctttctcttggtggtcaaggtctaactgagagaagcttttgttccttacacttagcacttaggtttagccctgactcacacacctccaaagtgccagcatgagcaacagccacacctgtgaagattcatgttgggggcagaaggcagattgggatcaaagcctcctgtaacacaagaatttctcagcagctgtagtcccttaataattatggtttggagctttgccaggaagcaaaaccatttggcatgccatatttaacagtgagcactgttcagtattcatcatggtcctgtgcagagcaaataggcacctcaaacaaaggtaggatatttatgtgtgtataaaataacctgcacctacatcaaacctaaacatgttttcagagaggaatgtggcacttcccgctgcacagtgcctactttatgagtgagtgggagaaaggtcacgggctctgctccttctccttcctcgctggccttagtggttgtagtaatagcagttgctgtagtagcagcagtagtaggtttttgtttagaaaatttaccaccattctaggcaaagcagtgtgctaactgcagaaatcttttgtggcgtattgctgttgacatgggaagccagaattagtgagaggatggggagagcaaggccaggccagggactgaggaagaggagcgtgtgctggaagccctggtctctggagcagtggaacctgggatcctggtctgtatagaattttctggacaaacgtttgtcatttgaggaaggcagagaacaggggctcttgagaggagaggatgttagagctgcacctgaatagatgagcagaaggctggttgatcacattttgttggtacaccagagaatagagagagcaaactggaagtggggcaagcctggccctgtgaggttccagtaaggcttcttgtcctagaagttctataatctccccatgcagcaccaccaacaggacaccaagtgttagagtgcacactcctacggaggtcatgtggactctaagcctctgttcccataaaccaaaacaaactcccttctggtgttatgtcacagcaacaggaaagtatggcaggtgctggccccagagaactcgattgtggctgtgaagaacctgaccgtggttttgttttgttttgttttagagggatgggtaaggttttggaactgtagactagaaaagcaatgaaagctgtcttaagaggccaatctagtagtagtgctgagagtgatgcagaggcccagctgataagattttagaagcgatcgggtccttattctcaactagactagtggcaaagaatctggttgctttctgcccatgtactaagaacttacttggacaagatttaaatgtaatgggctaatttccttgatgcagggaaatttcaggatgggaaatttcaacgttataatgttgagtcagtggtgtgcctatcactgatggctcttaacacaggtgggacgggaggaaatgcaaaatacagtcagtatgcagagggaaagcacgggagcataaaggcacagaaaacctgctgaacaactgcctgtaattgctcacattaggtaagaggatgccttcctactgtattggaacaataagaaaggttccccaagggcaagactccagccagcattcaacttataatagaatccaagtggttttctgcttttacaaaatgcctgtatacacactaccttactcgtgtgattggaggaggtgaagggtcatcccgagaggctagctggacagtggtgtcagtgatgtccatgtggtactgtctttccctgtgtgtctttccctgcgaggccatgagaggacactgataatgctataaaggtgaagcctgggttaagatgccagaactctgagacatgtgctaaggagagctacatatggggatgggaccagcccaagagaaaaatatatgttccgggcagcaaaggtcgagaggtgaagccatctagcccctttgaaactaaagcctcagataccagacatggagctgcaaattttggtgtctaccctgctgggccccatttcctcccttttcaaacaggaatgtatattctgtaccattctatgtttggattacataagttgtactttagttttactgtggttagagtcaagaaattatcttgaaacttaagagagactttgaactttaaaatagtattgaagctgtgaaaggctttggggacttttaaagttgggctaaaataattttgcattatgagatggtctcaagcctgtaggagcaagaagccaaatatggtggtgtgaataaatttataaatttaaatatttctccaccataggctcctgcatggtcccagtcagcagtgctgtttgggaaagttatagagcttgtagaacaggaagtgtcactggtgtgggcttgcccctatgggatagcctcatcccactgccacttacttccctctctgtttcctggtgtaccagcaaaatatgatccaccagcctcctgttctggccacctgctgccatgccctactgttgtggacctgaagcctttgggtccataaataaaaacaacccagcaaccacagtagctctgattctgggagcatagaatccagacagcgtaatgatcactaggagcacagagacaccacagtggtcaccggaaacacgggaagtggaggaagagaatattggagttgagggggtgaaggatggtgagagccaatgccagcagggacatctttctggatgttaaagacactgatgtgtctgtctaaacctacagaggtctgctgatcagggtctcaagtcgagtttagggcacattgcaaagggagaggggttatctgaagatggccaaaggagaatgccagggtgtccaaatcagaggccaagagaagaagatatagccccaactagaaagttaagagtatactggcttctgccaggaggaagaggggacacagaaaagatggtaaaagtaatgggtgtgtctcagtagagcagattctgattgagaactgtttttataatggcttcccctccccgcagagctcagaccctgggcctcacactgtgaatgcctcattcctgagccctctgcagctgtgtaatagtcgcctttaagactgctggttcctaggcctggggacattctgaaagcagagtgaactaggaagtagaaaggcagtttaccagtggactccagagaatgccaaagagggaggttccctgccctcactcattcagtgtaggctggcccaggactctagctgaactgaaacatgcagctccccagaacctgcaccacgtctctgcgaagcgtgcagttctgcggtgttcaggttaaggctactgaacagctgagcggacagaggaagaacccaaaggcttgagatcaacagcagcaaatggctctaagggagaggaaacaagccggcttcaaggctgcctcccttcaggaatgccccctcttatgattgtgtggacattttgtgtgtgatgtcaggttagccatgcagctgattgcagctgggaaagtccttgctttagtcctgactgggaggaggtacagaaagcagctttgcttccgtgctgtatcgaccaccctcctgggctcacacaagctctagttcttctacccctagactttgttcttttctgagcccgggccctggaaatgaggagggttagcttctcccccgccccactttccccaagtttcttttcttttcttttcttttcttttttttttttttttctttttggttgttctgagatagaatctagagcatcatgcctgctaagcagacccttcctctaaattctccatgcaggctactgtctttcagccccttatctataccactcagatttagggacagtgtcctaggaacagtgttcactaaacaggctctttctttctttctttctttctttctttctttctttctttcttccttccttccttccttccttccttccttccttcctttctttctttctttctctttagatttttttatttatgttagtacactgccttcattgtcttcagacacaccagaagaggacatcagatctcattacagatggttgtgagccaccatgtggttgctgggaattgaactcaggacctctggaagagcagtcagtgctcttaacctctgagccatctctccagccccaaacaggcactttcttaagcacccattttccttgaatgtctcagggcacagactttaattgtcaagaggcctcttttctggtcatgctccctgcgatattttcttaaagctcctttctttgtttgagatgtaaattatataatgtaaaattataaagattttaggggctagagagatagatgtctcagcaattaagaatacttgtcctgtcagaggacccaagtcagttaccagcatcctcatggtgacttacaaccatctgaaattacagatccacaggaaccaacacataaggtgctcagatggtacatgtacatgcaggcaaaacactcatacatataaaataaagaataaatctggagctagagagatggctaaagggttaagagtgctggctgctagctgggcaatggtggtgcccgtctttaatcccagcacttgggaagcagaggcaggcggatttctgagttcgaggccagcctggtctacagagtgagttccaggacagccagggctacacagagaaaccctgcctcgggggaaaaaaaaaaaaaaaaaaaaagagtgctggctgctgttccagaggtcctgagttcaattcctagcaactacatggtggctcacaaccatctgtaatgggatctgatttcctctttgggtgtgtctgaagacagatcactcatatacatataaataaataatttaaaaataataaattaggcctggcatggtggtgcacgcctttaatcccagcacttgggaggcagaggcaggcagatttctgattcgaggctattcagggctacagagtaagttctaggacagccagggctacacagaaaaaccctgtctcgaaaaaccaaaattaattaattaattaatcaaatctaaaatatgattttccttaaacattttttaagttgtctttattattgagggtggagcgtacccttccatagcctgcatgtggagtggagaggacaacccttatgtgggatctagagatcaaagtcggattgtcaagcttaaggcaagtatctctatccactgagctgtctcaccagcccaaaattaaccaattgagaatgcacaggtgggtgacatctcgtatattctacagtcatcactgctgtctgattgcagaacatttccttcactcttgccattgagcaagccctgaaggccagcagtgcttcctgttcccgtgagtctgccttctctagacacttcatatagctgaccgtaaaatatgccttgcgcttggctttattcatagtgctcatataaggcatacccattttgtagcctgaatcaagcactttctttttgggtctaagtgatattccactgtatagctctgccatattttgtttatatattcatctgttaatgaatggacattgggttgttaagagtgtttttttttgattgtttctgtacacattgttaagtcccaggtctctgggtatgtacttgagagtagagtttcaggtcatatggcagttttatgttttaattactacacgatactaaacccatccttaaaacagggtatgatttaaagtacacccataataccaggtcttaagcagctaaggccagaacatcaagcagtaagccttgagaacactgagttaggtctcagtcaaggtggaaggaaagaagtgcaaactatcccctgactaatacacaacagcgccaccgcaccacgcccacatgtacatatgtgcatgcaccctgagccttttggcccttctttctgctcagctggcctcactgttgccctccactggtatttctttcatgccctgttccttacttctcttccctctcttatgacttcttcaagctcagctccccatttccagcagcatagggccatgtcagcaaatagacaccaggccttaaggaggaagactattttcaggacagctgccaagaataggggtaacatgggacagataagggtattaagaaggggtttgagcaaaaattcagtttcaagatagaaaattcctagggcagagactgcggctttgtggtgggtcacttggccagcatctacaagttccgtctcaaactaggatcagtgattcccagagactgaatcataggtacttaacatttcaaaccgtgtttcctaaccctgattttattacatttatttccagtgtgtgaatatgtgtgtgcctgtgtgacagtcatggaggctagagaggctttgcaaattcttaaaggacatttagtcttaagagctcagactgagaagaaacgccttgtaatcgagcaggccacctgtgaaatcagcaaggaacactgaggtgaagaagcatctcaatggatctgttgagtgagggatgtagactgtgtgtgaagagccactgcgctctgacctggccaaggaagaggcagccagtgaaaagggagcccaggtcttcctggtaccccacgggcttcccggtgtgtaggcattaatttgtcctcttggctcatggggttggggtcagattgccattccagggaaatcacttttgggaagaatataataataacacaagccatctaccatcctcagagctgcaggcatgggacccttgggtactcaacagaaggacgccaccaagaagcagggctagtgaccagaggctacataggtgctggtcacctgaaggaggggctgaactgattcaagccagcgcactgccatgtgtaggacactaagtgtaggcccaagtattctgagatgggttcagccctctgcttaccagggccatctctccaacccagctgcatccatttgttcacattgagaggcactctgggggcagaggcaggtggatctctgagttcaggaccatcctgttgtacatggcaagttccaggtcacacagggcaacacagtgaaatcccatctcaaaaataaagaatgaaattaaataagaataaataaaattgaaggggaaattcacttactcagatgtttgaaatggttttgtcttttctaagttattgtaatttcaccgtgtaaagggttttcagggagctagagatgagactcagtggttaaaagcaggtgcggcttttccagaggactggagttcagatcccagcatgttgggcccctcacagctaactgcctacaacttaaactccaagagatccaacgccctgttctggccaccacgggcacacatgcatgtacacacacacaaacacactcacacttacttatgcacatacacattcacacacctatacataaataataaaagtcgatctctttaaaaatcataaaatgaaattaaaggaactagacattataagctacacttgtaatcccaacactatagagatggagacagaaaaatcatgagactgaggccattttatgggtttgaggccagcctaggctacagtgaggtcctgtcttaaaaacaaacaaacaaaacaaaacagaagaaaagagagggaggggttgctagggcagttgttttctattatagattaaaaacaaaaccattcccactgggcagccaaatatgtaatgccaggtcagcacatttatgcaggtcacactagaaagaagggactgtgggaacttttgggaacctaggccatttgtgtcatttaaaaaaacagaaaatgaagcaaaatccaaagtgtaatatttgaaaggtttttgtaccaagtattttttaaataccaaaataatagcagtgtgagatcccttcagacctggaaacgtatttccacctctgggcaatgtgtaataactccacctctgggcaatgtgtaataactcttacagacagctgttcaggggggatggctgcttatgacctattcttcccctctctccaaaggatgtaaagggcatgtcctaaggggtgccttctagaaaaggggtaaacctctccatatctgccagggacccaacccgtcattcattactggggaccctagagacagtttgtctgtccatttgctatactaagataaacattagtaaaagtgttggatgagattgtgggtgggggttaaggtcttacactgggccctactgaaactgatggtgcctggcatgtgccttcagaacgttaacagcatccctaactctctggccccatcacatgccaacagcgcatgcgccctcctgactgacaggcagatctcctccccagatagaccgtccctcagacaggaggctgggaccaggaagagctggtgtagggaggacagagccagtgccgagccactcccagcccttgacgagtcatggagaagggctcaggcaagaggtcctcccagcttctcctcttcctcccctccaacattccagggtctgtttcccagtgaacgcatccagctggaagcccagcggctaggagacctctgtaatggggtcatagagatcaagatccccagacatcagccagggcaaaaggcaaaacaaattcaagggcaagcagcaaagcactgactggttgtagacagctcagctcagctcagtgatccagagcctgggctgcagagccaggctccctgttacccactgcctgtgcagtcttgatctatgtactccaaatgtcaacaaccctgagtgtaaaatggtaaccacactgccatctacctcattcttgcagtctaggagttttcccattacagaaacaagcaaaacaagtaggttgtctacataagactgtaaccccatagtaatggctggtatctgttagagactgtcttagtcagggtttctattcctgcacaaacatcatgaccaagaagcagttggggaggaaagggtttattcagcttacacttccatattgctattcatcaccaaggaagtcaggactggaactcaagcaggtcaggaagcaggagctgatgcagaggccatggagggatattccttactggcttgcttcccctggcttgctcagcttgctctcttatagaactcaagactaccagcccagagatggtcccacccacaaggggcctttcccccttgatcactaattgagaaaatgccttacagctggatctcgtggaggcatttcctcaactgaagctcctttctctgtgataactccagctgtgtcaagttgacacaaaactagccagtacagagccccagtacacacaaacatgttttctccccatatatattatctatccacatctaaacagacagacataggtatctatctaagattgaacccagaccctactcggtacaagcacagctcccccatggagccacatctccagccctccccaggactgttgatggacagctcagggagttagagccatggggtaatcactgtcagggtcccgaggcaggtctgactaacagaagaggaagacgaaggtatagcagatgaagcagaccgaggggaagggaagggaggtgagaagaggactgtgactgaaggtctcggtggccacatctgtcaaggtgaggctgacgtggagcctgcaggtctcatcagagggtcatctagtcaaatgtccatatggacagggcaaaaaacagccctgtgaatagcagtgtaggagcaagaagtaaggtaagcagttctctgccacaaggcatggccagcgctcttccccagacaccagaccaatgtgtcagtcattttcctcaaactaagctattcaccctctgagaaagggcctgggcttttcctcgtgtctctcacagagcagctgatcagtgcacagctgtgaggaggaaatgacttagattggtgggtgatgggttgggaagagagagggggcggtaattaatgtgtgctaatgtgcagggcccccaaaaccctgaccagtcccctaaaactgacacaagttcccacagatgcctcaaacaagattctccagagctacagaaagaacaaactcaggctgtcaccactgaacagctctcagttgacctctcaggagggtgagaaagacagtcactgggccttagtctagacagcattcccctgggcagctcacaaccctggcactccagctccagggcacccagtgccctcctctggatctgcagcacatactctctcacacacactttctctgtgtgtgtgtctgtctctctctccctccctctgtgtgtgtatgtctgtctgtatctctccttgatccccactgccttgatccccataactttgtggtaagttttgaaatggaaaaaggagtttgtggattaaatccttagctttcgtttctgattttcaggatcccttgagtatgctagggtcacagcagactcctaaccacacttgttgcttggctttcttgtttgcttgatggacttgccagcctgagtgctaagtggaaatcccccttgctcttctctagcctccctttagaggcagcctgaccagcagagatctgactctgtccaagtttagcccagggccaagtagtcagctgggggagcaggagacccgcaccattactcccagcatcctaccgtcctggcatcctcccttgtggttgtgatcctctccaggttcatgtccagccaccccacacattcttcttgtgcctgtcattctcctaccccttcctaaggatgactcaggacacagggaagccattttgccatttgtcagtggaacagcctgtcctttctggtggcatgtctggtcacacccatgtgttctttactagacccaattgatgcgttatctaagctacaaacactgaatttactgatacgaggattttgtttaatggtgtgtagctctggctagcctggactcactatatagactaggctggccttgaactctggagctctgcttttctctgcctccaaaatgctgtgattaaagctatgcatctccatgcctgacctcccttctgcagagttttcagtccttgccgtaagatcaaggggggtaaggaaggactagagagagacagagagagggagagggaggaaaggaaggggaagaaggagaaagagaaggaggaggagagaaagaagaggaggaggatgaagaggaggaggaggaggaggaaaagaagggcagaaaagttagaagggtgcatttttctgagatctcaccatcagctagctgacctaatactgatcccataatacaggcttacacccgagccttttcaatgaggaaaagtagaaaggccagtgtgctgttcacctcagaagttcttccccccaccccccacccccgtggtgccatccttcagggaagccatatttagcactgcacttccaaggagcagccttgtgcctgctccagtgtcccagtgctggctgcagtgtgcagaacagaccacaaggctctgagagtggcagggtcaactctgtgctgcctaactgtcgcctccaagtaatgctaccatgctggacagtcactaacctgcttatctcactatttaaacaaaaaaacaaaaaacaaaagaccgtgcttctgcaagttcctgttgatctttgcttcagatgtaacatgaaactgtcggcaattctgtttcctcagagccccttggagttctgtgactgtacagtagtagcttcagctctgatatcctcatgtgtgaggcagaattagtaacatccagtccttagctgctgggggctgaggatacggcttggtggcacagaacttggctggcatgcataaggcctggcaccaccaaaaaaagcctagctcccttcagtagggctacaagtgccacaggccttccatagcccagctaaccactggggactggccttctagtccacatttcagccctttcctgagtgtgcagagcaggttcagctggttgtcagatggccaggaacattctctgggctgagctgaactggatttgggagataggagagttcagtagaagtactcgttagatggaggcagtagtgcagggggcttccacagagacccactctgagttgaaaaccttaagtcttcaggttccctcttgctgagatgagaaggcttaaaccaatggcaaaagtgtcaacgcccaaccctgctcaaaactccacttttagtccaggcagacaagtaagcaggggtcccccctcccaagatacctacttcctctttgtatacttgctctttcagcaccttaccctcagaaagcccggaagtcaagaggataaagaagggattcactatccatacaacagcaacagaatgtcagccaaatcctaggctaaggtcatagctcagtggtagagatcttgcctgacacataaaaatcaggaccaaaatgcagtgcacccctgcctttgcacagctgtgagatgtgtgaggctttacatctctaactgatgtgagagctgggatcagcccagctggtagggcgcttgcctagatgcttacccaagggcttcataaaactacacagacatggtgccacacatcgatctccccaatacttggtagacaaaagcagaggacatgagacatgcaaagtgatcattggctacaaaccaagcatagtggcacacggtatccctgtgcccaagaggtagaatcagagttcatagtcgtccttgccagcatccagtcggaagccagccagctacatgagaccctgtatttggggaggtggggggaggtgaaagggaaaaaatgtttttacatgtgaaatttgaatgaccgcatgtatagataacattttattggcacacagccaccatctctattgattgtctcagtaatgcttggctcgggatcatataaagcagaggtggtgcctctctgctctgagacgacatggactccctctccttccacttgtgctagagaggctgagagcggtgtctagtcctaccgttgctgctgctccgtaggacagggtggcggggttcaggctaagggctcgtactaacggtgtagaaagaagaacccaggatgggatcaagagccttccgcgaccagttctaccaccaccaccaccacccctgggatggtgacagggcttttagccaagacccttcatgttctcagattcctctacacttcttagggctggccctgagctacattcagtgactgtctccctcctgtctctacagaatttgccttctgccaggtggatgcctccattgctctgaccctggccttagctgttctgtgtgacttgctccagcagtgggaccagctggagccaggactgcctattctactgggatggctactggaagagggtgatgacctcgagggccacgtgcagagcccacatcaggtaatcccagttacttagggagctgggggcagacagagtgtcctagccctgaggtggagccctgagggcctaggaagtttctagatagtaaaaagtgtgtctctagctgctcccatgcagaggagagactgacgaggagaaacctcccaggtgaggctcacaggactgtggaggtccagaccagttaggaaggttcagacaagttaggaagggcactttgaaaaatgcaccttgaatattgagaataaaatcatgaaaaaatgcttatcagttgatcttagcatttcccaaggattagggtccttctagaaaatgtggcagggagtgtgtgtgtgtgccggcttcctgcctcttcctgaaaactgaagaccagcataggcaacctgtgttttccactgggaaaccagcagtctgtccccacatatgaccactagctagctccatatcctgagcagaccaagagtcagtgtataccaacccttcaaaacccagtctgtataagaaacaggaagatgatataacaaagtgttttagatgaaatgaccctaaacccccatagcattctagaaattttgtctcttttgtgctgctatcacacatgtcccagtaactctctgctctgctgtccagacttcctttgtgcctcctctgaattttctcggcacaccttaaaacctaagatttttctcagtacaccttaaaacctaagacccacttccgcaccaccagttccccaagtatcttggcttggagctaattcacatctttatcaaaggtcgtggtccggctgggagagaggtattgagtgaaagtagaaggtgaccttcagagcggcaagtgctgtggcacgggcgctgacagccccagtgggccctgtcaggaatagacacagctcccacatctagtgctgtgcctggctccacaggactcctcggagacttactctggctgtttgtcacttgatgtagggggaagaagagcatatctttgaaaaatcagaagtcaacttctgggctgagactctgaccttcgtgaaatccctgtgtaggcaactcttccatctcctctgtcaatctggctggcagtcccctcactcccagaagctctgtcacttgcaaaggatagcatcagagcagagtcacctcatctctcagctcttcagagaacttccactctcagctgagtttttgaagacagtggaatacacgaggctgcgcattcaggaggaaaggactttggctgtcctgaggctgttggcctgcctggaaggaaaggagggtctcagagccgaagactgccctagggaatggagacaagtaatggccccaagaacagaagcagcatgctgaagaaaggtggctgggcctcagctcaggtctgcaagacacatacatggtggacaccaattgaaactcttttcctcaggtgcctccccacttctgggagtctaggcttctgtcccttcctactgaggaccttgtctgcagcacactcattcaaggcaacccaattagttgcagctacctaggaagtgaagctgctgtctgcaggtttactgtctccaggtgcaagccacctgcaggcctgaactagtcagttctatcccaaagccagcgcccatttccccatacactgactgcattgaattcagtcttagcttacatgtctctctctctctccctctctctctctctctctctctctcacacacacacacacacacagtgctctttctctctctctcacacacacacacacacacagtgctcttttgtttggttttgtttagcaaatacctatttggtcatatttataaacttttnnnnnnnnnnnnnnnnnnnntatgtttgattctgggaatattaagaacctacaacatgcaaatacttgcattttactatctacctgcccaagtccttcagtggtccatattaagagtccccactgtcttacccagaaatgcctgcgaaggctaggaacccttgtcacccatcactggcctcagctattggacagagcctggggaaagggaagcctgagcaaatgcttaattcattcggtgccaccactgtacaccgtcctgtgattggtggagacagcagagtgccaagaaacacatttacccactttaggtgattccatatagaaaccggaagggtttgtcacttcaggcccagcccagctggcatcctcgaacaccagcaggtggcgctcttgcacacattatgctgctggtctagcgcttttagcctactcttttaaaactttttaaaactattatcagcacctgtacatgataggagggcacccatgccccagcatggatgtctgaggaagttgagggacaactttatagagccagctctctcctcccgcctctgcatgggcttcagagatcgactcaggctcaggcttgcagagcacgcacgtttatccactgagccgcatcatgtggcccagcttaccatgctacgtgtgcttccagagtacgtgacacccgcagacgcttgccttcaattcacggcgtggatgtgttgctgtagtgtgatccacattcccagttatccacaaagaccatgccagccatagaaggaacttgtagggcctatagctatgttcagatacttctcagtgagtagtcacttagaatcatgaggaaaagggagagaggcattctatatgctagctcctcctgcagagacgctgacatttcacatgtaattggtctcagaagaaaaccatcctgcaccacagaaacacggctgtgctggagtagagacctgtacgcagggagagggaagtcaggagctgtgtccttcctggccatgaagaggaacagaaatcccctgggtggtcttagaaacactcagcaccctggggtctgtgtggccctgtagtaattacctagttaggcagtgcaacccactgctgatgaaaaattgaaaacctaacattgtttagtttgttttgggctttgcttttagttttctgagtcaggcttgctatttacactaggctggcctcaaacttgtgttaatcctcctgcctttgcctcctgagtgccaggattccaggcatacaccactatacccagcattacactactttaagatctagttggtgagaggggctggtggtgacaaccttgggagattaattctgaacaggacccaaccttccctctccccttccatctaaaatgaaataaaagcagttacatgacaataaaaccatctcacattggcaggcatgctgtcccaaagcatgtttcagagcaggcttatgttatctccaagtccatcctaccaagtctgccattagctgggacttaccccagacttggatcttggctggctgtggccaatctgggaggacaggagggatggatggctccacaggtgggcttgtatctgcaatcctgctagcagtagctaggggaacgactgctgcatgctttcctgagagaaaccaggaaaaccttagtcacagcctcatgcttacatttggggtcctttcagccacagaacccagcagtaataggggcaagagcaacgtgggtgggaagagtgaagcagccatcttccctaagtcactacacttgagggtcctaagatctgggtggccccttgctcagaccacagccaaaagccagtttgctttaatatataagatggtgagggctttgttcctttataggggtatggtctcactctcacactaagctgtgcaaggctagcctaaaactcaccacagtttgtgattagtgctaggactataggcatgaaccaccgtacccaacccactcagcactacgtccaagacactacagtcttctggcagccattggctctacctacaggggcagcatgcactgcagtgtggccaaatgcacctggactcaggagcctttgagtgacagatctacctccttagcttcaaggttaactgatacagcccaagtgcacactggactgggtcaaccagacaggaagagcaacatgggaaggatgtagttggtcaagcagccttctctggcaactactgggccttccacccagggcaacccggactgccagctgggtgaattcatgggcccaactccagcttttggcagccagtatgaagtgtagggataaagggttctggacctgaccagatgggcctcacggggtgggggtgggggtcgctaggtgtgtggaggtgtgtgtgtgtgagacccctctcaaaaagagccaggggccttctgggactgctttttccatggaaagctggtaggagttgcactaaaggcaaccgaatgaggacctctttcccccaacctgggtggtggttcagcaatcaccgcctcgcctccggcagctcacacaaagcttagattcaatgccgcgcctcccacagcagaaggaggaaggttgcaggattcgacaggccaaggctgtacaggcgggaagccttggctaggagctgcacccacatccccgagaggaggccaggccaaccagcaggcacaaaggtgaaggaagtgacttcctctatgtccacactgctcctccgacttccctctagtcccctggaataggctttcccgccccggacaccccgcgccactcggcgcctttggcccaggctcaaggtcttgtgatgtgattagcaaagccagcgccttgtcctcagacactcggctctgccccacaggccgcagcgctcaagtcctgtttactgagcctgggcggggagaggggcggagaaacgcgccaatgctcctccaggctggccgctcccgcccccacccctactgcgtctccacgtgcagccgggccggagctgccacctacgggacaggccgcgacccccgttcctagtcccaagcaacttggccaagcgcaccattgctgttttgctgttcccgcgcgcggagcaaaaactaggatgggagataaaagctgcgccagtcggcccagccggatcgggcgaggaaaggcacgtcccgggtagccccgtcctgggcagatagaacgtgtacgtgctttccaacgttatactcgtagaggcggaggagagcgaggtattcccgccgccgccacccagcaggacccaagggggccgcacgccccacgccgctcgggacgcccaggctgcccgcccctcccctcccctctcctcccctcccccgaaggggaaaaattggcggcgaccaatgagaagccgagaaggagcctgacgtccgcgggctggcgggcggcgttgcctggagaccccggccggtcagcgttcagtcccctcccccggtgcgctttgccccgccgccgcgccgctccggggctgtataaagggcgcacgctctcaggtctccgagttccaccagtccgcgagctgccgacggctcgggcggggggcgggccggggcgccgagctgcgctctcgcttctcctctgccccccactccgcgccacggcctcccgccgccgcttcctcggccgcacaagcacaactttccgtccctccttggccctcgcccgttattcatcttggttcgagtctcgccgtaccgagggcacctcccaacctccacgcttgcaatttcgaccattacaggacccagaaaaatgtcgaccacacttctgtcacccttctacgatatcgacttcttgtgcaaggtaagcaggcagccggaaaggatggcggacggcctggaaccctttggagttccgagacttgccgccgggccgggccgaggcgggagggacccttccaagttgactttgcgggtggagggaagtcctggagttagcaggactgtgtgcttgcgactgtgggcgtggagagagcgagtagcggctggagcagccgtgctcctcccgaaccgaccgcggccacgctgccgggacttcccggacagcgtttgcgccgcccaccccgtggccacgggcccaggatcacatggctagacccggagcggccggggtgggcgtcctccactctctccggcctgcgttttgcgagtgtagcggtggaggctgaatcggatcccaccagaaaccccaacaagtgggcagttgggactagggcgttcactctgcagttagccccgactctcttccccatccgattttcatcccgctcccgctcccctccctttggcagacggagaaatccctggcaaacctcaatctgaacaacatgctggacaagaaggcggtagggacgcccgtggctgctgcccccagctcgagcttcactccgggcttcctgcgacgccactccgccagcaacctccacgcgcttgcccaccctgtgcccagtccgggcagctgctcgccgaagttcccgggcgcccctaacggcggcggcagcagctgtggccccgcaggcggaggcggtctggcctcctacggccagctcaaggagccttcggggggcagcggcacggcgctggtcaccaaggagagcaaatttcgggaccgctcgttcagcgagaacggggagcgcagccagcacctcctgcacctgcagcagcagcagaaggggggcagcggctcccagatcaactccacgcgctacaagacggagctgtgccggcccttcgaggagagcggcacgtgcaagtacggcgagaagtgccagttcgcgcacggcttccacgagctgcgcagcctcacccggcaccccaagtacaagacagagctgtgccgcaccttccacaccatcggcttctgcccctacggcccgcgctgccacttcatccacaacgcggacgagcggcggcccgcgccgtcggggggcggcggcgcctccggggacctgcgagcgtttggcgcacgcgacgcgctacacctaggcttcgcccgcgagccgcggcccaagctgcatcacagcctcagtttctccggcttcccgtcgggccaccaccagccgccggggggcctggagtcgccgctgctgctcgacagccccacatcgcgcacgccgccgccgccctcctcctcggcctcgtcctgttcctcctcggcttcttcctgctcttccgcctcggcggcctccacgccctcgggcgccccgacgtgctgcgccacggcggcggcggccgcgctgctactacggccccgggggcgcggaggacctgctgagccccggagcgccgtgcgcctcctgctcgtcctccggcgctaacaacgccttcgctttcggcccggagctgagcagcctcatcacgccgctcgccatccagacccacaacttcgccgccgcggccgccgccgcctactaccgcaaccagcagcagggcctgaccggtcccgcgccacccccggcacagccccccgcggcccccgcgccgccctccccgcccttcggcttccagctgccgcgccgtctgtccgagtcgcccgtgttcgacgcgccccccagccccccggactcgctctcggaccgcgacagctacctgagcggctcgctgagctccggcagcctcagcggctccgagtcccccagcctggaccctggccgtcgcctacccatcttcagccgcctctccatctccgacgactgaggcaagggggcgcccgcgaggggttgggaaaggcacagcgggggccaccggttggggagggcgacactgcggcagacttggaggcccctccgagcacttggactcgaactctgccggaaggggccccgcccctaccctttcggttctctcgttttttttgttttttattattatttttattattattattattgtaaagattcgttcttgttgataaaagccaacgaactttttcgtatggatgaacaaaatattcacaacagggcggttgtgatgcggaaagaacaaaagataccaaacacttaggtctcagatgagtttgaaactctagttttagaagaaaaaaatcagcccagcaccagcagctaccaaccaccattccatctcttctttcactcgaaagccttagaaacagtccagatgtgagaactcttggaaggggttccaagaccagtgtgagccagccggctgccacctccctaaactataagcttctagaactcaaaataatgccaggaacatgccttgattcgagtcgctcgctctcagcctcctttgtggtggttgtttaccttgtttttgttttttagacaaagttctgtatgtctgggggtggggaagcccttgcattccaaagtttgataacgggctcattgccaccacgtagtgtgggtgtttagcttagaaccatttcctctgctctctggaagctatgggcagagctcagttcatagttgttgggaaataagtgcttcatttttagttgttctgagttgatccgcaccactgcaccacaactcaatatgaaaaactatttaacttatttattatcttgtgaaaagtatacattgaggatgttgtccatactgtatttatcgagtatgatgaaagcaatagatatatattcttttattatgttaaattataattgccattattaatcggcaaaatgtggagtgtgttcttttcacagtaatatatgccttttgtaacttcacttggttattttattgtaaatgagtaagaaaaatcttaatttaagagattgtatgtaatatttatttcattaatttctttccttgtttacgtaaatttcgaaagatcgcatgaagaaaccatgcaatcttgatgctgtggaagtggtttgaggaacattttgaggttttcttagaatgtataatggttgtagcccatccaactttaaagagagaaaggtgagactgcagtcaggctcacgtgtggcttgcttctctacatccagctttataaaccaccagctctactgtgacattgattatagagacatgtagcaataatgggggaaatggtctcagtgccttcatagggcccgaacttgccttaaatcttcctcaaccagataagtatttcattcgtgcttgagaatttgaatgtcggacgggttcacctgcacaaaaagaaaagattttttaccactttttttttactatagctatgaagtgaagaggccacatcttagcgctgaaatgttggtggtacatgaatatgccttgttcaatgacagtccaaaaacttgtactattatttttcaatgtaaagaggcaggaatgtctccggctttcctggatggcagataaatgagcagttgtttagtttgtatgtaggtacagttggagcaccgcgtgtgcactctggactactttgacagaagtaggtttttgaatgtaacaagattaagtcaacttgagttgtaatatattttggggaatcagttcactacaaattgtgactgtaaacattgtactgtaaatgttttgtagtttcccccaataaaattttttggaaaaaaactctttgagtaatggttgggggggggggttgtttgtttttaaactaggtctcctggccggggcaagtctgggaaggggtgtgttcaggaggtggggagctggcagttctggatagagcctgcatccacttgtacctgtgtttgttttcaactgaaagtaattatttggctgtcaagggcatttgttagctgttccctttggtaataagatgcatccctgtgttggctgactggttgatggcagggcctggcgggagaccgcgaggggtgtggccggcctgtgagtcacccagtgatcacgtggatgctctggctgctgaaggtccgatttttccccagtatgcctgacctgggcttgtagcctggacagggaggtctgggccaggcgttggtagctgggctcgggttttgcttggactttgggaggctgggggcatgtccttcagagagggagggaggaagatgaagccggttaaacttctatctgggtgatgtttgtttacacagacaacttcctctgggaataagcacattcaggctatttatgcaaaaggaagaggccaaaaagcaacttcatccgggctcctaccgaaggcaagcaagccgccctcagtttgcctgcctccaaagcttaggaagtaaaatcgtttgtgcttttggggtttttttgtttttaccctgctcgttttaaaacaatcttttaaactcagtagagttaggttttcctaccccacccccatacacagttcagacaccttttccaaagtaggcaagagtttgggctctatcaaccaatccttgcccgcctctggttggttgcccctgccttggccagggtctcctgtgactcacagctggggggtggagtgggggccctgtctgagggatgcgccaagctgggcagctgtttccagttaaggaagatggagctggtgctcactggagcagactttttttttttttttttttttttttttttgcgggggtgggggtggggtgcttgctttcgaaagttgtcccagatgtttggccttgggggggttggagggagccggaggccaagaaggcctggggctgggtgaagcccctgcagctccgtggcctccaggccataaagaatgcagcccgcggaggaaatggccccacagtggagctatttaggcccggctttcatttcaaagaccttgtttccacttcattctcaaattatttttctaaacaagtacttttgatcagctggaatgttggacttctctttggggtaagccacattcattttttaaaactgctctgaaagcccagagctggggctctggagttctgtgttttggctcgcattgtggggagcttggaaaggtaggtggtcattcattcacaggttttctcacccacacatcagtggggacgttggatcactgtgcctcggcagtgcccagaatcaaccgtgtttacttgaatacccttaggacagtgtctttgtaaatctgggacctagaagtaaaacttggaggactagccaccacaggctacagagtggagctaaaagcagggaggccggaggcttaatctagatgggactcatcctgagccgttgtgggtccagaccggagtgaatccaagaagcccccacactgcctgctgggagactggggtgggtatacaccaccgtagaaatcattccggaagggtgccacatacaagtgcaggtcttctgcgccttctgtctgaatctcctgctatccatgggaaaagcagcaggcacaattgagaaac

SEQ ID NO: 240 - DNA, 1228 bp, Mus musculus
aggtttttcatctgttacaagcctacattacagactgcagacacagaacaaatgcagatttcctgcaagagctgagtgatgtcactgcttgtaccaaagccaaactctggctggccatgaggcaaaatccatgcctggtaaccagagctgtgtatattgatattctcttcctgctgactaactgcctggacagacctgaggaaggcaagcagacagctctggagagtcttggcttctgggaagatgtgagaagaattatcctggaatcagagctgattaaggggttcccctggaccttcaaggtgccaggcttgccccagtatctgcagagccttaccaaactagccatccctgaagtgtgggcgtcgcttgctgaagctaaagggcaggcgactgctgttcctctctccttctctcggcttctgaagtcttcctttcctgaagtgcgcttgctagccctagacaccttgctggaaagggcaaggtcctctgaacaggagcagaaggagccacttcctctgctctgcagtatgggagaggagcttctactgctggcgatgaaggaagaccaccccggatgtttctgcaggaacaaagattcactcgcccctgagctgaggcagtgggtccagctggttgtctggtcctgtggagaccatcttcctactgcatctagactggctgttgctgaagtcctcacaagcaccgcacccctgttcctcaccagtccccagcccattctcgaactgcagggcacactttctctctggaggtgtgttcttacccttctgcagagtgaggagcaaaccgtcagagaggcagccacagaaatcgtgacaacagccatgtcacaaggaaacacttgccagtcaacagaatttgccttctgccaggtggatgcctccattgctctgaccctggccttagctgttctgtgtgacttgctccagcagtgggaccagctggagccaggactgcctattctactgggatggctactggaagagggtgatgacctcgagggccacgtgcagagcccacatcagggggaagaagagcatatctttgaaaaatcagaagtcaacttctgggctgagactctgaccttcgtgaaatccctgtgtaggcaactcttccatctcctctgtcaatctggctggcagtcccctcactcccagaagctctgtcacttgcaaaggatagcatcagagcagagtcacctcatctc

SEQ ID NO: 241 - protein, 403 aa, Mus musculus
  VARIANT (1)...(403): Xaa = Any Amino Acid
VFHLLQAYITDCRHRTNADFLQELSDVTACTKAKLWLAMRQNPCLVTRAVYIDILFLLTNCLDRPEEGKQTALESLGFWEDVRRIISELIKGFPWTFKVPGLPQYLQSLTKLAIPEVWASLAEAKGQATAVPLSFSRLLKSSFPEVRLLALDTLLERARSSEQEQKEPLPLLCSMGEELLLLAMKEDHPGCFCRNKDSLAPELRQWVQLVVWSCGDHLPTASRLAVAEVLTSTAPLFLTSPQPILQGTLSLWRCVLTLLQSEEQTVREAATEIVTTAMSQGNTCQSTEFAFCQVDASIALTLAVLCDLLQQWDQLEPGLPILLGWLLEEGDDLEGHVQSPHQGEEEHIFEKSEVNFWAETLTFVKSLCRQLFHLLCQSGWQSPHSQKLCHLQRIASEQSHLIX

SEQ ID NO: 242 - DNA, 355211 bp, Homo sapiens
  misc_feature (1)...(355211): n = A,T,C or G
gtggtggcatgcgcctgtagtctcagctacgtgggaggctgaggtgagaacattgcttgagcccaggaggccgaggatgcagtgagatatgattgtgccactgcactcaagcctgggcgacagagtgagatcctgtcttaaaaaaataaataaataaaattattgctgcaggttagcctgtaaagaacatttctaaaattaatttttaacattttcaatgttatcgtttttaaaaactataaaaatttttatatgtatagtgttttagaatttataaagaacttcaacataggtaatctaatgtgatcctcaaatggctactatataggataagaaatctaatttgttgaatgggcaaagggaggcttagaaaagtaaatgcttacctgagaccatattgctaataagaacctgaaacagcaatcttagaaggtcttctgacttcatggggctgtattttgtatttttgtggtgtttttgccataatggctgaaagtgatcatgtatatgaaatgtcgaaacatatatacagcttgataatactgaacatatgaataaaggaggaaaactaaaataattttttacatatttgagctatattatgcaattcataaatttgaagtgtacaattcagtttattagtttattcacagagttgtacaaccaccagcatttctaaaattaatttttaatattctctttgctatattttttctttaaaaatttttttcctgaaatttgtttttagcatcattttttaaaactataaaagtttctacatgtgtagtgctttagaatttatgaagcactttaacataggtaatctaaagtgatccttatcaacatttctgaaatgaagttttaacatcttaaaagttaattcaaacaactttagaatatttttatcacagagaagccccattcccccaaccatctccaacacttggctttccttatcttttaaattacatgtgtaggccgggcatggtggctcaagcctgtaatcccaggcttgcagatctcaggcaggtggatcacttgaggtcaggagttcaagaccagcctggtcaacatggtgaaaccctgtctctactaaaaatacaaaaaattagctaggcatgggggcatgcgcctgtaatcccagctactgaggcggctgaggcaggagaatcgcttgaacctgggaggcaggggttgcagtgagccgagatcgcaccactgcactccagcctgggtgacagcaagaccctgtctcaaataaataaataaataaataacttgtgtaatcatcacagtcaaggtagtgaatatttccatcatcccccaaatttccctatgtcccttcctggactattattatttttgagacaaagtctcgctttgtcacccaggctggagtgtagtggcatgagcacagctcattgcagtctcactcctgagctcaagcaatcctcccacctcagcttcccaagtagctgggactgtaggtgtgtgtcaccacacccagctaaatttttaaattttttatagagatggggtttcactatattgcctaggctgatcttgaactgctttctggattattttttacaaggtaaaaagaatcatatacaaatttgagatctgttttggctttacttgtagttttttgttcttgtaaatttaataattgaaatttgtggtcattctttgtatttaatatttttaaagtctaaattgttataaaatgaaatttcttttactaatcagtttacaataatggctcatggctcatttttcttcaggattaaagagccaacgctggaaatgtttctgtctagaatcttagcatcctggactaattcagccatacaagtccttgaatcaagttccccgagcctaacggacagcctgaatgggaattcaagtatagttgggagacttttggaatatgtctatacccattgggaacatccattggatgctctgagacaccaaaccaaaatcatgttcaaaaaccttctccaaatgcaccggctcactgtggaaggtgcagatttcgtccctgatcctttctttgtggaattgactgagagtcttttacgattggaatggcatattaaaggaaagtacacgtgccttggttgtttggtagagtgcataggagttgaacatattttggctatagataaaactattccatctcaaatcttagaggtgatgggagaccagtcattggtaccttatgcaagtgacctcttggaaaccatgtttagaaatcataagagtcatttgaaatcccagactgctgagagttcttggattgaccagtggcatgagacttgggtttctcctctcctttttatattgtgtgaaggaaacttggatcaaaaatcttacgtgattgattattacttgccaaaattattaagttacagccctgaaagcttacagtacatggtaaagattcttcagacttctattgatgctaaaactggtaagaaaaatgcatttttgttttagtagtttctaattatgatgcttaaatgtaggtagctatgcagatactaatcatattcaaatttaaatatcacttctataaatagtaaaggaagagattaatgatagatgtttcagtttgaaacgaatgttcctatatatagctgaatggagttttttggctgaagtcatttctacaagctaaagaataattccacttaaaatgataaactttcctgtattacaaggttttaattcattttttcaagttctgaatttattttattgtatcactgaaataaaagtttgtgtgtcttatataatgtgcttattcaagtcattgagacaataattaaaaattgtgttaggcaaggttaaagacaggtaacttggcagtagcaagtttttttctctggggaagtgacaaaattcagaggcatgatctcaagaaatagccatctatagttatttagaataggggtaaacatcccattgaaactcacaaaccctacaggaatcactgcattcaagcataattcaggatgtgtaaagtgatgatcatgacacatcatataaatcttaaaattattacattctgtttaacaaagcaagaatgtagtatcgtacagcataattttaagaaatattttcaactaaaattgttaaaaacgttcagtacttcaaagagtaaccatgaggtagcaggaaaatttgattcctgtatgcaaaaataagccattatttgtaatttttgacaacacttgttcttgagtttttgaaaagccatctgaaattcaggattcaagaatctgttctgaagtaaggttgtctttatttttatatcaagctgccctgtcttcttggtaatggctgacgtcctagcctctgaaaccagcaggctctttgtgttccttttttaatctttactagtgagaaacagccactctaaaatatgcagagaggttcagtgtttacttttagagaagtaatagtctgtagccactgatgtgcttatttctccacctgattttatttcctgatttgctgcctgattccctttctaggtgttagggaaaaagcaaaaatgttagcaggtaaataatgatttgtttatgttaacgataagagaattatgcttacttgaaatgattgacaaaagggcaaatcatattaaataatgattattttagaataggaactttaatttgtgttagaaatgagtttaaaatgtgatttttatttattgaaataaaatgttaattggaaacatgaaaattagcagctgataattatagtagtcattgcataatacagtaatggtctttgttattgtgctttcaggacaagagcaatctttcccatccttagggtcttgtaatagcaggggggctctgggagctttgatggcatgtctgcgaatagctagagctcatggacatcttcagtctgcaactgatacctgggagaacctcgtgtctgatgcaagaataaagcaaggcttaattcatcagcattgccaagtaagtaaagaaaattacctggatttgtacatgcagtagatccctttcatgtagcagttcaatatagaggcccctacattgtatcctgaactgttttagggagttcataaagagaatgagtagaaaccctagtctcccaactaaactttcagtaggccctttcttcaagctactgaaagtttagttgaggatgtaagaaaacttacataaaacaactggaaactcttagaactgacaatacagatacaagcatgccatcatgtgcccttaaatacataaggactcgcttggaaggctcagaagagactgatcagagcaggtggtgcttgattaggaaagtgatagatatgattagaaaagaggaagccttggagcagcatacaaaatggagggacccaaatgagcaaggtctggaggatgattaagaacattgcttatcaggggtggagtgttttggacattttttggaaaggcctaatgctaggctaaagacttagttggttcccaggcaccagctggttttactaagctaaaccaaagctactctgttttcagcaaggagttacattagtggaaacgtgagtttccagagtgggagcagaaagaaaccaggaaaccagttagaagtgtctggcagtaatttaagagtgaggtgatggggtaaaaggggtcactggaaaaaaagaaaaaggaatgaagctgagcattaccacggaataaaaatctttaagattgttgcattttataaatccccaatttacatgtttaataaaagaattgtataggaaataaccctaggatctttgagattaggaaacctttctgaggtacctattggtgaactgaagtttacttttttccttttgtagcctatgtaagtaaacaattcaagtgatttaggctttgcttatttcttggaaaattaacattttattgcttgatgttttttaggtaaggatagatacattaggcttgctttgtgaaagtaatcggagcacagaaattgtttccatggaagaaatgcagtggattcagttctttattacatacaatcttaacagccagtctccaggagtgcggcaacagatctgttctcttcttaaaaaggtagaatttcccatcagaaggcatagggaagtggtgaactttgtttgggaaatcgtttttaaaaagagcccagattttgggagcgtgtgggaatggtcatggaattgggctaccacatctgttcatgacggccgttctgtgacctgttctctcattccataaagcttacatttgggattaaaatccagagtgaaaagcacgcacccctccccccaccattttttttcaggagttcagaatcagcctgggcaacacagtcaaaccccatctctactaaaatacaaaaaaattagccggttgtggcagtgtgtgcctgtagtcctagctatttgggaggctgaagcaggagaattgcttgaacctaggagcggaggttgcagtgagccgagattgtaccactgcactccagcctgggcaacagagtgagactcggtctccaaaaaaaaaaaaaaaaaaatagtcttgctctgtcagccaggctggagtgcagtggtgtgatcatagctcactgtaccctcaacctcccaggctcaagcgattcttcctccccagcctctgaagtagctgggatgacaggggcacaccaccatgcctgactaatatttaatttttttttagagatagtgtcttgctctgttacccaggctggtcttaaactcctggactctagtggtcctgccacctcagcctcccaaagtgttgtggttacaggcatgagccaccacacatggccaaaaggcctttcattttggtgtagtaaatcaaccttgggctcttttttgtaaagaaaaagtctaatgctggagttaaggtagttttaagaaaacttggtaacagcatttttatagtttaagcacctcaaaaaagatcattatcaaataatctaacttgaattaattgcacacacatttatggggtgaagaattggtaaagtagggaaatgactaaatcatcttcaggtttgtgccaacttaaaggaaacagaattgtggtttaatgacagtattctgctttgcagtaatagtttgtttttggtataaaaattattttctgtcaaaaagaaacattataaaatattaagagcttaaaaatctgtactcttcttgcctgaagttttattctaaataatttgcctctcaggctgacatttaaatttaatgtgtggctcacctgtgcttcatttcctttgtttcaaaagttgttttgtaggatacaggaaagttctcaggtactttataaattggagcagagtaaatccaaacgtgaaccagagaatgagttaaccaaacagcacccttctgtttctttacagcagtataaggtaggtgatatatttctaaacatgagagtttttttttaaattaaaaagtattatgaataagcattaaagggaaataaatggaagtctcttggtaaattgtgtttctgtgtttttttccttcaagctgagtattacctatttctggtgctttggtactctacttgatgtagcctgggttatggaaccagtgctgtaccggaggactgttacagaatgacgttagtgggctaacctcaatcactttcagcttatgtgggcgagatgaatttagtacttttaacagaagggtaattgacagtactgaactctgtccctctccagggcagaagactgctgttgctgggcctgttttctctttagtttgagatgacttacagaggcttgatattaatgactcttggcccatggtccagctgtggagggagcttgctgtctgtgtcacattggagtgagcttgaagagtagggctggattttagggcattgtgttaatgaaatggatggaaacctgggtgcagcagctccagtctgggccagggcttagcttgacaatcttgaatttcttttcagcagaacagattgagcttttcactgttcttcccccaaatctagcctttgagaagcagacccttttttgctcctcaggcccagacagaagacagagcttacctatttattttaagaaagaggtagattaatagattaatgatacgtttgaactatgacatgctcactacttactctaaacattattatggatgcccttggttttcaattttgtatttaaaagataaaaagccatcaaacaaagagtatttatatacaaagggtaaaattagcttcgaccttttaaaatctcaatgacgaagattgggacgtcacaacctgaactttaaagacatgggtttactcctgattctgccacttattagttggctgacttgagtctcgtcaactataagcagaattagtaacctttctcaaagattgatttgaggattaaatgaaaaagctctttgtagactatatatctctccacttgatcttagctaaaaggccgagaagtgatgtaaactatatatctctctacaaagccttgctgggagtcattaaaagcgactagtggtggctcatgcctataatctcagcactttgggaggttgaggcaggaggatcacttgagtccaggacttcaagactagcctgggcaacatagcaagaccccatctctattaaaagaaaaaggcaaccctgagacgggcgtggtggtgtgcacctgtgttcccagatactctggaggcttagggttgaaggttgctggagtctgggaggtgagggctgtggtgagccttaattgtagcactgcactccatcctgagcaacagagcagcgagaccctgcttcaaaaaaattaataaataaaaattttaaaagtgactagaatatatattgaagcccccagtgtgtgtgtaggatagttaaaaaaattttttttaattaattaattctttgtagatgtaggttcttgctgtgttacccaggctggtttcaaaatcctggcctcaaatgattccccccactccacctcccaaagtgctgggattacaggcatgacatactacctattctaaacattattatggatcattgtggatattatgcccagcctagttattttgtagtttctcttagatcattggtagatttaacaatgcatatctcgtttgctttctttttgcaaggggtaaaatgacatttgtgaaaactcaggtacttggaaacacaaaagctgttttttggattgagattgtgaattttcatgtatgcatggtttcttggtctgtgttataggtatgcatgttttgaaaactagtcctttgagtcttaatctgagtcagtctcatggttgtggtactttttccctactggtacacctgtggcttttagaggttgtgaccttggcactatattgttataatcgtcacaccatcataagagtgggtgccatgcacagggtgtggtaggctcacaatcaatagactaagtgctgggggagaagaggaggctattagttgaaaaagacatcttctaggctagtggagattattttatacctaaataactgatattagtaactagagtacttttaaatttataaaatattagatgtccatgttctcatttaacctttaataaaaaggctgtgagataacattcttatccccacttaacaagtgagaaagctgaagctcagtgaagttcaataacctgtgtaaggttcctcagctagtaagtggtagagtcagaactccaatccagacctgctcttgactccaaaatctcagtattttctcccccccacccccagtagtagcttaatgaaggcttggagataagaaagtacagggagaactcagggaatggtgaattcactgatgtgaatgacataaaataccttggggaatggaggacttgagtaatgggaagtgaatccaaagaatcaagttgaaaatggatagctttcagtgataggccaacggatttggaagcttcactgggaaccattaaaagtgattagagcatatactgagcattactatgtatgtaggatagtgtgctcagcactagggatccaaccatagaaatgtggtccctgcatatattgtggctacagtctgattgcaggaaacaagaactatattaaaccatataaatgacaatacggtttgaatgatacttcttagtggatgatcttgttttttttcagagggagtttcgctctttcgcccaggccagactgcagtggcgtgatcttggctcactgcaacctctgcctcctgggttcaagcaattctcctgcctcagcctcccgagtagctgggactacaggcctctgccaccacacctggctaatttttgtatttttagtagagacagggtttcatgttggacatgctggtctcgaacttctgacctcaggtgatctgcccacctcggcctcccaaagtgctgggattacaggcatgagccaccacgcctggcccttgttgtgttttaatgtgaatcctgttttacttataattaaaagtagcttaactaggatatttttcagtaatggccctatttctttgaaaccgaatagaattaataacctaataaactcttagggcttgtgggacctaaaggataattccccagggttgcatgtccttcacctgagaaatgaatgcagggatctttggtagagtcagttaagactagggctgttgaacccagcgagactctgtcttaaaaaaaaaaaaaaagtgtacgtatctgtctgggctacaatagaaattgtacttcttgttgactctgcaaatatagggtttattaaagtcataatatagcttatggtcaagggtgctaacctgaattattaagcaaagtgaacaaccagtatcattttttgaaatgttttatttttaaattgaaaacaaaaacacccactcttaaagggtgtttaatactctgaatataacctattgtgacgtaattatacttactgtaattttttttttttttttaagaatttcatgtcatccatttgtaacagtctttttgaagcattgtttcctggatcttcctactcgactagattttcagctttaaccattttaggttcaatagctgaagtttttcatgtcccagaaggtaagtgtttaataatgttaggggaagtaatttttgttttctttcaaaacatacttattctacattttgctttatttgaagtttcagttttgttgcctttctttgaggttttattcttaccttataattcttgcttgtacataatgaaatttgctagtaaaggacagaagaggaagaaactatctcccttttcattgatcattatttgccaaccccaaagtataattttcatggattatgcttattatggaaagagttccagctattacctcactaatttgtttgttgctgttttaagatagtatccaatctgttctttaagttttaaaatttgaaataataatagcttctattatatttaatatttctcagtgagtctctgtggttaaaatgtggtttcctttacatgccgtctgtttcatgtgcctcagtctggtttcggaaagacaatatgaggatgtaatttccaagtattctgatttaataataccctttgtttttccttctgtgtggttctcaagagggtcaaatttcagttccctctttgaatctttttttttgtttcattttttcctttttgacaagaaatgattcctttttttttattttgagagagagtctagctctgttgcccaggctggagtgtggtggcgtgatctcggctcactgcaacctccgcctgctgggttcaagcgattctcctgcctcagcctcccgagtagctgggacttcaggcgcatgccgctacacctggctaattttttgtatttttagtagagatggggtttcaccatgttaagtcaggatggtctcgatctcctgacctcgtgatctgcccgcctcggcctcccaaagtggtgagattacaggcgtgagccaccgtgtcctgctgaaatgattcttttttccctgtatatgtgtgtatatgtgttagaatgtgggatttcttgcttgtgctgtcttcgttgactgtggtcaaacaggaaaatatcctgctcagctgctccttcacagggaatggccaaagcatgagggagctttacactatcattggattcttttttattttaaattattgggcaaagtgtaattttttgacaggaggacagttagctaatgtaaaagaggcttgcttcatttggggaaaatcagtttttaaaagtttttattctgaaaaaatttaaatcagcagcaaagtttcaagactggttcaatgaatagctatttatgctctacctagattcatcttttttttttttttttttgagacggagtctcgctctgttgcccaggctggggtacagtggcatgatcaccgtgacctctgcctcctgggttcaagcagttctcctgtctcagcctcctgagtagctgggattacaggcacgtgccaccacgcccaggttaatttttgtatttttagtagagacggggtttcaccatgttggtcaggctggtctcgaactcctgacctcaggttgtccgccttgcttagtctcccaaagtgctgggattacaggtgtgagccaccgcacctggccaattcatcagttattaatattttgcaatatttgctatatctgtgtcctttattaattctataaccataacacaatgatcaaattcaggaaattgaatgttgatacaatgctttaattgaatacgcaatccatatttaaattttgccaattgtcccaacaaatggccttttatattatagaacaaaaagcttcctacaatctgggaagcaatcctagatcacgcattgcgttttgttattatgcctctttttagcttcctttaatctggaaagtttctaattttatgatattaacattttggaagaatatgtctcagggtttgtctcattgtttcctgatgatttgattcatgctgtacatttttgcaggaatgttgcataggtgataatggtgttcttcacagggcatcctattagagtattgatgatactggcttgttccagtttttataataggaaatatgatcaccttattcacgtggggatggcaggctgaaaaatggtctctaaaacacatccacatcaaatctttagaagctgtgaatgcaaaccttacatggaagaagggtccttgcagatattcttaagtttaggatcttgaggtgagataattctagattatcttgatggatcaaaaatgtcatcacaagtatccttacaagacagaggcagagagagatttgacaaacaaaagaaagaggaggcagtgcgacagcgtaggtagagattggcgtgagatggctacaggccatggaatgcctgcagctgctagaagctggaagaggcaaggaacagattttagagcctctggagtgcatggccctactgacaccttgattttgaacttctggcttccagaactatgagagaataggtttctgtggttttaagcaccaagtatgtggtaatttgttacagcatccagtgaatgcaggagtctcccatcagttcatagaatttcaatagtacttcaacttaatttagaaaataagtttttaccttagagtgattgattacttcaaccatataacaaaaagttttctgcacatttaaagcagttgtagctgcatctaagtgtgtgggaaataaaactaggctgaagcgtacctataatttttcagtcaagagagtaatttaatacatttaaatgtactttaaaaatgaaaaccctgagtcatctttctaatgaatgagttgcatgtaattgggcagtgacttaatgccatcgtaattatgttagacaactgggaggtaatgcaaatggagcaagccatactgcaggcattacttttaaaggaggcttaagaaccttgactatgaagtacaggatgggagatgtaaattcatccttcattatcatctcaagaacttcagtggtaggactgatttgagattagtcaaatggtttctgcctttcctagaccaggaagaataagttgcatgcatctttcttatgtggaatcaaatgccacaatattgatggtaaaaaaaaatctacaattagattaaaaggatttgttcagcaaatattaatttcgtgcttattatatgtcaagcagccgaggatattcacagtcccaaacaaggtgcttcttcctttggagcttatgtttcagtgaagggagatagtaatgaacaagtaatacatagaatttgtgtatattagtacattatgtagatacaagattatgtagattatttatgtacaagatgtagataagttctgtgaaaagtatttcaagaagataagggggatatatagaagacctaggaggctggagagtgttagtggcttcatacagtggtgtcataaagggcttcacatttgaaaaaagctcttaaacaactgatggataaaagaataaatcatgaaggaagttagaaaatattttgagatgaatgaaagcaaaaatacaacgtacgaaaacttatgcattgcagcaaaagctgtgcttatagggaaagttatagctgtaaatgcctacattaaaagatcttgaattaataaccaagttaactttccacctcaagcaattagaagagaagaacaaacttaaaaggaaggaaacaaaaagattagaacagagataaatgaaatagaaaacagaaaaacaacacgaataatctacgaaaccagaagttgtgttttttaaagattaacaaatagacaaagtttgctaaactgactaagataaaagaaagacagtataaacaactaaaatcagaaatgaaagtaggaacatttctattaagtttgcagaaataaaaatgattataagacagtacagtgaacaattgtaacaccaacaagttagataacctacatgaaatggacaagtttctagaaacatgacaattagtgacttgagaagaaatagaaaatgtgagcagacctataagagattgaatcagtattcaaaaggctcacagaggaagagaaggttcagggcaagtgacttctctggtgaaatctacaaagcatttaaagaagaattacaccagtccttctcagactctttcaaaaaattggagagaagggaacacctcctacctcattttataaggccatgattaccccgataccaaaaccaaagacacttaaaagaaaaccagccgggtgtggtggctcatgcctgtaatcccaccactttgggaggccgagtcaggtggatcacctgagatcaggagtttaagaccagactggccaacatggtgaaaccccgtcgctactaaaaatacaaaaaattagccgggcgtggtggcaggtacctgtaatcccagctactcaggaggctgaggcaggagaattgcctgaacccaggaggctgaggtttcaatgggctgagattgcgccattgtactccagcctgggcgacaagagcaagacttcatcaaagaaaagagaagaaaacagaggagaagagaaggaaaagaagaaagaaaaggaaagaaaaaaccaaagaccaatatcctttatggatatagaggcaaaaaccctcaatagaatactagcaaaccaaatccaacagcatattaaaagtgttatataccattagtaagtggaatttatcccaggaatgtaagggtgggtcaatttaagaataatagtcaatgtaatacaccacattaaaatgaaaatggaaataccatgtgatcgtctcaatttttgcagaaaaggcatttgacagaattcagtacccttttatgattaaaaaaatgagcacagcaaaactagaaataggaaggacaagatgatgaaggacatttgtaacacaaccacaggtaacatcacactcactggtgagaaactgaaagcttttgtcctaagatcaggaagaagacacagatgcccactgtcatcactgctgttcaccattgtactgaaagttctagccagagcaattatacaagaaaaaaataaaaagcagtgagattggaaaacaagaagcaaatctgagcagagttgttaaggaagtaacaaaaacctcaggtgtcggctctaggaatttcatagggttgttctaacttgtaaattaaaattaaatgagaagtttgtatcccaatttatattcctcaaattaactaagcataataatgttttcagttttcattaggagttcacttgtgaaatgtttttaaatgttcttcacattttgccatgaaacctgtttttccacagttcttgagttttcatcctagagttaagtggagtcagtgattaccatcattctttgggataatttttcttttcatcccttggttggctgaaattcctttttctctaagagtttctggagataagtagttcttaatttcttgcatattataaaatgtttctattgttcttacacttgaataagagtttgataggcaaagttcttcacaccttcattccctgaggattttgtaagcattgctccattatcttttagcactacatgttgttatagggatgagtgaagccagtctaattttttccattttgtagatgaattgagcttttccctgaagggccaaaagattccttctttatctttgactcccagtaagtctatcaggatatgtcatcatactgatcattctatgtcagttcactctaagatatggtaggactttgcttttttttttttttttttttttgagaccaagtctcactctgttgcgcaggctggagtgcactgacatgagctcagctcactgcaatctccgtctcctggcctcgagcgattctgctgcctcagcctcccaagtagctgggattacagtcgtgtgccactatgcctggctaatttttgtgtttttagtagagaaggggttttactttgttggccagactggtctcaaactcttgacctcaggtgatccacccacctcagcctcccaaagtgctgggattacaggtgtgagccgctgagcctggccagaactttgtattctaggtcaagaagttttattaggatttttaaaaagatgtgtttctaaatttacttgtttttgtttatttttaacaataacttagaaatcttttatatagtatctttcaaaagataatggaatggtttaaaaatcttttttaatttggagaactgtagtacttattttgtcattttaagaaataaattaatggaaaagttactgttttagctatcatgggtaaagtatgaagtgtggttttttggtacttattttctataaatttggtcaaataacttcagaagactgatttctttttgttcacttttaaatctttttgtttttaaaatatttttaggcagaatttatacagtatatcagctgagtcatgatattgatgttggtcgtttccaaacactaatggaatgttttaccagcacttttgaagacgtgaaaattttagcatttgatcttctgatgaagttatcaaaaacagctgtacattttcaggtatcaggacttttctagtataaatgtggtatatgcatggaaactttctatcagcagataaagcaatctgaggattattcatgtgctttgcatctgcctgctcatgtttttggactgtttctttcagttatcattaacacctctctactattttggggttagtgggaaaggaggaaatatcaaaaagtaaataaggcacaaatcagtgagctttgctgtttttattgctttgataaaaagggaggtgtaggaggtggtaggttttattgtttacaagattattggtagattttagttaactgtggtttcccctgttcccttggacatgtaatattcgatcagaacacatcacttacagtaacttgcatttttcgagataatctccctttttcatacacttgagaaactgagtgtaaatgaggtagagaggatgtttctggtttttgaaccagcaatagctaaactgagactgaaacttaccgagtacttgaggttaacaacagttcctagtgctctacctcatccccagcccctccattcttcctgacacattgctcttcccactttggggtaggaattaaaggtggggttggaagtgaacacattgtgtggggatgagtctgcaggggacttccagaccctggctcttagctctgcccttgaggcttctcctagggctgttgggtcaccagcagagtactggttctggagcttagctatggctttctattagagctctataaaggccgagggtttctgctgcagctgagccatggtctaggctgtggttgttcagctgtgtttagggcatggtagcttgtagatgcagtggattctgtaggatcacatgccagagaggatagtgtctgtttctgtggcttctagatggctatgtagaacatctatctatctgtatctctcagaacatcaatcttttttgacttgggtccatattggaagttgctgtacagcatctaccgatgcctatgatttttcaggtgcccttgtgagcagaaagttccctggtgctcaggctgctaacttttgttaccatacacagtttttaaagaggagattttctcttcctctgtctgccactcctcaccttatcattcatcacatgtcacctcatattgtgtcaatagcgatgccccattcttggcaaatattttgagagtacctggatggagaaggcatattatggcataaatgtgaaagacctggcccttacatcactaaggggctcaggggacctctgcatctctaaatttgataaacccgtgcttggtatattgacactagccatagaattcaagaaatttagtaccacatgtggtttgctataggattttgattatactctctggcttgcagattagtaaaatagttaaaggaataggcattcaagatttaaaaatattaattatatatttgtattagggttttctagagggacagaactaataggatagatgtatatataaaggagagtttattaaggagtattgactcacacgatcacaagctgaggccccacaatagccctctgcaagctgaggagcaaggaagctaaagctgaagaacttgcaagagtctgatgttccagcgcaggaagcatccagcatgggagaagtaggccagaagactaaaccagtctaatctttccatgttcttcttcctgcttttattcttgctgcactggcatctgattagattgtgtttacccaggtggaggatggatctgcctttcccagtccactgattgaaatattaatctcctttggcaacaccctcacagacacacacaggaacaatactttgcatccttcaatccaatcaagctgacactcagtattaaccatcacaatattatatttccaaagtctttctttgggtgtcccttatataatatataattaatttttaatacagttaagtgtacagcagtttttgaatgctaacctgatctctctaaggacgtgtacatacgtattgttgacggcatatttttctcataaatagcttgactatcctactcacctaggttactctccttctttggagctgcatatcctaggtcttttgtcatattatacttcgattgacctaagatgacggaacaaagacattttagacttcaaaggctatttattatctttcttactaatgattaataaaacagttctgggacttaactgtcagttaaaaaatggtttagatgcttaattggttctttctaatacttatttaaacttgaactttggccactacttttaagttttttatttaggtcatagaaaataaacttatcaaatggtaaagaatttaaattgaaataaacagatatttaaatcagcacatttgatatccactgttgtgaaattataaaacatcatcaaatatttgtagacctataatcaacttcaaaattgagtgtataattattttttcctaacacaagatagggaataatcctagtagaatcagaatattattgagcagccaaaccctgacttccagacttatgaacacacagcttgccagttgttgaagttgggactaggacttatgtcttctgttgtcagcccagtgcctttccatgactacaacagcaaactgtcctttgttctgtcttctttaggacaggcgatgtgagtggatgtttctgtgagatataggtgtgggagctctgatgcataatttctgaggctgaattgatcactttgttttccacacacacaaagtttcaccaggtacagcctcccaggggatttgcagttttctccagtgaactacctgtataggaaggaggaagggagaagggcagccatatgatgcccaggtgaaacataagccctgagagactatgaactgccctgtctagaaatagtaaagatagtctggctgtagtcatagcaaaattctacaggacaaagtacacttttgctgaagaaagaagcagttttaaaaaaaggttttatcagtgttgaatttcccaattgaaattatttccagctgattaataatcattaattactgtaataaaaaactcacctatattcagggagagaggaaactaatgtttatattgacttacaattatatgccaggctgtgttgttttgttttgttttgttttttttcttttaatagagacagggtctcactctattgcctaggctggagcacagtggtgcaatcactgctcactgcagccatgaactcctgagctcgagtgatcctcacctctcagcctcttgaatggctgggactacaggtgtgcaccattacacccagctaatttttaaggtttttcgtagagtttttgtagagtaagttttttgtctcaccgtgttgcccaggctggtctcaagactcctaacctcaagtgatcctcccatcttggccttccaaagtgatggggttacagatatgagccactgcaccaagcctgtgttttttgttgttgtttttttgagatggggtctcactatgttgtcttggctgatcttgagctcctggcctcaagtaatcctcctccatcagcctcttgagtagctgggactctaggctcgagcccactgtactcagctccaggctgtgttttaaaaaatttactatttttttaaattaaagagatctttaatttgacagttactgagtctgcgctttattctaggattcggggaaactgcaaggcttatttcaggcagcattggagctcagcacaagcaccaaaccatacgactgtgtgacagcttcctacctgctgaacttcttaatctggcaggatgctctaccgtcatccttgtctgcctacttaactcagcaagttgcatgtgataatggagataggcctgctgctgtggtggaaaggaacacattaatgggtttgtattgatgtttgctcttatcaaaacgaatagcttagtctcagtattcatttggttagaatatctaatggttaaacatatattttgtggttttttatttaaaagtttatcagcatataagagcaccatgggttctcattatgcaaatgaacattttagtcagctataatacttttttctaaacagtggatttatgttgaataagtacatatacaaatatttattaataaagctcttttgaaatgagaatgacctctttctccaccaaaagtgtgcttttttccctacataaattatactgtgactagagacagaccatctttattgtttctatataggcggagttcctttttctgtcagggtttatgttttaattaactgtcatacccctgccttttactcttcccaaatagccagttccaaaacctagggtctgagattattcagatctagtgattttcaacaaatatttattggggattcatgtacttaattttatgctagtcagtcttcattttagaattgtactagaaataaggacagataaggatttttttttaataggaaaagggagatcagatatagaaagagagttaaaaattattatttccaggatggtagaaacagccatgaaaaagagaactagtaatgggagaaaaagaggaggccatgggtagttctggtgggaatatggccagagatctggagatagagaggtgacagtaccatggaggatgatgcttgcctacttgaattgcttcatagctggatttcaaaggagaccctattgagacagtgggaagaggactgcaattgaggtgaatagggaatgcatgcttcacataaaggctttcaattcaagacattttaggactttatgagatatttcaaacatacaaagaatgtttaaatatagacggcttaaaaaacatatatatatatatacatgtaatatatataaataatatgtaaaaagttcacaagttttattcacaagctaggtgatcacacttaccttaagtcatacaataacactcatatctttgaagcctttcctttatcctggctgtattttatattaatttttatcttcttttttttaataatattgcctctggtgtatatattattatatattattcagttttacatgatactgaattttctcagtagtacttactgtatatattgtacagatttaccacaatttatgaatccgttctcctgttgatggactttttctcctaaataaataatgccagtgtaaacattcttatgtagatcttttacatataggttgagcatccgtaatccaacacctgaaatggtccaaaatccaaagctttttgagtaccaacatgacactcaaaggaaatgcacattggagcattttggattttggattttcacatttggggtgttcaaagtatgatgcagatattccaaaatctgaaaaaatataaaatctgaaacgcttatggtcccaagcatttcagataaggagtacttagcctgtatattaatatcttctaatgcacatgtctaagagtttatggtaaacaaatggaataacctggtcacaaagtatgtgcatcttgaactttatgagatgatgccaagtaggcttttaaattacactctcaccaacaaattctgagacttgtattgcatcacatcatcaccataatttgctattgtcagattttaaaaatttatataatataaaacgatatctcattgtggtttcatcttacatttttctgattactaatacaattattttttcccatgtttacaagccatttacttttccccttcagtgcaatgcctgtcgatgtcctttgtccagtttttctgtagggttgtttgtctttttcttattgatttttaggagttcttttatatgttctgaataataatttactgtttttaccaaatctaatatttagaatataaccttctccttccaaggcgttgaggggagatgtctgttatactggtataactggacatgtacatgcaagagaatgaaattagattcactaccttatgccatatacaaaagctagctcaaaataaataaaagacttaaatataagagctaaaactataaaattcttggaagaaaacatagatgtcagtcattgtgatcttgggttaaccaatggttagttatgacttccaaagtacaagccacaaagggaaacaaaagataaattggacttcatcaaaatttaaaactattgtatgtgaaaggatgccattaagaaattgaaaaagcctgaaaaatggggtatttgcaaatcctatgtctgataagggacttttgtctagtatatataaagaacttgtacaactcactaataaaaggacataaccacattttacaattggacaaagaatctgaatagacatttttccaaagaagatatacacatgaacaatgagcacattaaaaagtgctcaacatcaaaagcctttacagaaatgcaaatcaaaatcacagtgaggaagcacttcacatcccataggatgactgtaatttaaaaaagagatgataacaagcattgatgaggatgtagagaaagtggaacccgcatagactgttggtgggattgtaaaatgctgtatctgctttggaaaatagtctggcagttcctcaaaaggctaaacatagagttaccatgtgaccctgcagttccactcttaggcattgtcttagctcgagctgctataacaaaatgccatagactaagtggcttaaacacagacctttattctcataattttagaggcagagaattccaatatcaagtttccagctcctgataaggggcctctttttgactctcagatggccatgttgctgtgtgctcacatggcaggaagagagagcaagctctggcctttgttcttttaaggacactaatcccattatgagggtcctaacctcatgacttaatctaaacctaattaccttccaaggtctccatcttcgattatcacattagggattagggcttcaaaataccaatattggggtgggggaggaagcacaaacatgtagtccataacaaggatatacctaagagaaatgaaaacatacatctaaacaaaaacttgtacaagaatgtttatagcaacattatttgtaatagccaaaaagtgggaacaatctacgtctgtcaacagatgaatggataaataaaatgtggtatatccatgtggtatggctatacagtgagctattattcatctataggaaggaatgaagtattgatacatgctgcagcatggatgaactttgcaaacattatgctaagtgaaaagccagtttcaaaagatcgcatattgtatgattctatttatatgagacgtccaggcaactagtttattttctgtctatagatttgcctactctggacgtatcataaatggaatcatacaatatgtgatcctctagggctggagaagggtagaggtgcaaggagagcagtgactgctaacgggtaagttttcttttttttttttcgtttggtggcaggagggcagtgaaaatgttctaaaattaattatggtgatggttgtacatatgtgactaataaaaactattgtatacttcaaatgtatgaattttgtggcatatgaattacatctcagaaaagctgttcttttttttcttttttaatttgaaagccatctgctgtccaattagcacatgccacatcagcctggggtttgataccctagtgagaggatgtttaggaggaaggactaagagtgaatgctgtaatggatacaggcagtttagggaaggacactcagttctgcctagaaatgagccaccctgttggataaccctgaaagatctctttttgattaaaaaactctagtgtaaagttcatttgagttggccatattaatgggaactattttgctgttcgtacatttacaaatgttttaagattgacattactttgattttctgtttgctttttctagttatcaaatgcttgatggaaaatcttgaggaagaagtatctcaggctgaaaattctctgcttcaggcagcagcagcatttccaatgtatgggcgagtccactgtataacaggagctttgcagaagttatctctaaagtaaggatttccacagctgcctcctgtctcagaaatccattcatttctgagctttaacctctggttggaatgtgtcctgggaaaggaatgcagtctattgctttgaataaaattgaaaatcagatttaaaaacatacgtatctgtgtatatttttatgtctcacatgttttatgtattgaacaattttgaaacacaaagtcaatccttttatctaattttcatttttaaaatgtgatttttgcttttagtataaatttccctaatgtccttgttgcagcagcctgcagttggtgagcgagtggagacctgtggtagagaagctccttttgatgtcctacaggctttccactgtggtgtctccagtcattcagagctcatcccctgaaggcctcatcccaatggacactgattcaggttagcaaatgaagaaggccggctagagtgctgtggtttgattattatgtctttacctctttttttttttccccaagtatttctttggggagatataaaagctaagttgaggagaaaataattattattatttgtggtatttctgccttttagcaatagttttaactattaaaaagtagcaaaaaaaaaaaaaaaaaaattcccaaaccagaggatgagcacggtaccttctaccccagggtaacttgagttatataatactgtataagttgaacatcccaaatctgaaaattggaaatacaaaatgctccagattttgaaactttttgaacaccaatgggatgctcaaaagaaatgcttattggagcatctgtattttggattttcagattagggctcctcagccattaagtacaatgcagatattccaatattcaaaaaaataaattgagaacgtttttggtcccaggcatttcagataagggatgcttaacctgtgctaaaattgagtgttccttttaatacacagaaaaatcatgaaatatatttatgtttggtgttgaaataaagtttgtaaatgtattttagagtgcaaagagaggcttgtattagaaaaactgactgtatcataaacactcactgaaccatatgctgaaataccttgggctgataattaaggtaatgtggagttatgtgttttgcacagagaatattaggttttgttctttcctaaaaatgagttagaagattggtgatggttcacgatagtaagacacatttatttagcctgttgttagtctaaataccaaattattttatttaattaatttttttttggtagagatgggatcttcctgtgttgtgcaggctgctcttgtcaagcaatccttctgccttggcctcttaaagcattgggattacaggccttagccactgtgctggccttaaatactaaattttgtcgctttagattttctacttgagcagtgcataagaataaggaacatgcaatcttatagctaatatttgggtcagcaaagtacccatatattctggatgagaaatcttgaatatttctgttacctactgtgggtagatcctacagaggatgctaacattatctttattagtgaagagttttaaggtatcagttggtctcaaaaactgtctttgccccacagacttttccttcattctgcctgtctttttacctctggttgtcttcatttttgctgcttcttccctgtgttatctgccatacattctgaattgcatgaggaaagtctcccctgaaagctgtaaaattgaatggataggattcttaaaaatttattctctgatcttttcttggtctttgcgtggtttcttttggggtcattgttagtttttcatggctgttgaaatttatttttgacaaaattccaggaaggaacataagatgttgattgaatcatcatgatagtaatttgcgtgtttgtatttcccatagtacctaaatataagtcaaaataatagatgtacaataaataccggttcttcgatttgttaattgatttcagatgattaccaatggctagttttgaaaatctgagcctggctaactccttactacctacatccattcattccttcaactcatgttcctgaacctctgctgtgagccagtttctgttataggcactcgtcactcagtaatgaacaaagtgttgcattcatggagcttacatttcctaatccagtgagtgcttagggaataaaaatgaaacttaatgtaatatgaagactgtaaatcataattagaaagcagtatattacataatgtgtttcaaagttgtggagtcgttacgatattcctgtcctataaaagattgtttttgctgttgatgggtttttaaaaatgtctttttacctttctatctttaaactttgataccttgtattatgatggggaaataatctattttctattttttatatttatttatattttaaatcaaatattgatttttttctacttttctgttgcctgcttcatttttctttcatagagaaatagcctcttaaaactaaatttattgaagtttattgcacttctttgacatgattagcaccatatttgagatatttagacaacactaagaaaagcagtgtagatgacatggtggcctttgtcctgtggacagtttcagtgagttttttttgttgttatatttcagtctaaattgccatattttaaaaatgcactcaagcatcatgaaaactgtataaataattttcatattatccaccttgtgagtcccttctaataaagctgattattaagtattgaaaattatagattttttgagtaagcatccccaagggaaatctggcatgtgatgtgttactgggtttcatgtacgctcatttctttccctcagagtcagcaagccgcttacagatgattctgaatgagattcagcctcgagatactaatgattattttaaccaagccaaaatattgaaagaacatgatagctttgatatgaaggacttgaatgctagtgtggtgaatattgatacttctacagaaatcaaaggtaacttgtataaaatggatactgtaattcatgtttaagtaaccagtaaaatgtacagaatgccctttttatatggtaaattagaggttgcaaatctgtgcagaacatttctagaaaataaagttttttaaaaattttgttttgggaaagatttgggtttaggaatggatttataagacttttaccaggggggtggagccaagatggccgaataggaacagctccagtctacagctcccagcgggagtgacgcagaagacgggtgatttctgcatttccatctgaggtaccgggttcatctcactagggagtgccagacagtgggcgcaggacagtgggtgcagcgcaccatgcgcgagccgaagcagggcgaggcattgcctcacttgggaagcgcaaggggtcagggagttccctttcctagtcaaagaaaggggtgacagacggtacctggaaaatcgggtcactgccatcctaatactgcacttttccgacgggcttaaaaaacagcgcaccaggagattatatcccgcacctggctcagagggtcctacgcccacggagtctcgctgattgctagcacagcagtctgagatcaaactgcaaggcagcatcgaggctgggggaggggcgcccaccgttgcccaggcttgcttaggtaaacaaagcaggcaggaagctcgaactgggtggagcccaccacagctcaaggaggcctgcctgcctctgtaggctccacctctgggggcagggcacaaacaaacaaaaagacagcagtaacctctgcagacttaaatgtccctgtctgacagctttgaagagagcagcggttctcccagcacacagctggagatctgagaacgggcagactgcctcctcaagtgggtccctgacccctgaaccctgagcagcctaactgggaggcaccccccagtaggggcagactgacacctcacatggccgggtacccctctgagacaaaacttccagaggaacgatcagacagcagcattcgcggttcacaaaaatccgctgttctgcagccaccgctgctggtacccaggcaaacagggtctggagtggacctctagcaaactccaacagacctgcagctgagggtcctgtctgttagaaggaaaactaacaaacagaaaggacatccacaccaaaaacccatctgtacatcaccatcatcaaagaccaaaagtagataaaaccacaaagatggggaaaaaacagagcagaaaaactggaaactctaaaaagcagggtgcctttcctcctccaaaggaatgcagctcctcaccagcaacggaacaaagctggacgcagaatgactttgacttgttgagagaagaaggcttcagatgatcaaactactccaagctacaggaggaaattaaaaccaaaggcaaagaagttgaaaactttgaaaaaatttagacaaatgtataactagaataaccaatacagagaagtgcttaaaggagctgatggagctgaaagccaaggctcgagaactacgtgaagaatgcagaagcctcaggagccgatgcaatccactggaagaaagggtatcagtgatggaagatgaaatgaatgaaatgaagcgagaagggaggtttagagaaaaaagaataaaaagaaatgaacaaagcctccaagaaatatgggactatgtgaaaagaccaaatctatgtctgattggtgtacctgaaagtgacagggagaatggaaccaagttggaaaacactgcaggatattatccaggagaacttccccaatctagcaaggcaggccaacattcagattcaggaaatacagagaacgccacaaagataatccttgagaagagcaactccaagacagataattgtcagattcaccaaagttgaaatgaaggaaaaaatgttaagggcagccagagagaaaggtcgggttacccacaaagggaagcccgactaacagcggatctctcggcagaaactctataagccagaagagagtgggggccaatattcaacattcttaaagaaaagaattttcaacccagaatttcatatccagccaaactaagcttcataagtgaaggagaaataaaatactttacagacaagcaaatgctgagagattttgtcaccaccaggcctgccctaaaagagctcctgaaggaagcactaaacatggaaaggaacaaccggtaccagccactgcaaaatcatgccaaattgtaaagaccattgaggctaggaagaaactgcatcaactaacgagcaaaataaccagctaacatcataatgacaggatcaaattcacacataacaatattaactttaaatgtaaatggactaaatgctccaattgaaagacacaggctggcaaattggataaaagagtcaagacccatcagtgtgctgtattcaggaaacccatctcacgtgcagagacacacataggctcaaaataaaaggatggaggaagatctaccaagcaaatggaaaccaaaaaaaggcaggggttgcaatcctagtctcggataaaacagactttaaaccaacaaagatcaaaagagacaaagaaggccattacataatggtaaagggatcaattcaacaagaagagctcactattcctaaatatgtatgcacccaatgcaggagcacccagattcataaagcaagtcctgagtgacctacaaagagacttagactcccacacaataataatgggagactttaacaccccaccgtcaacattagacagatcaacgagacagaaagttaacaaggatatccaggaattgaactcagttctgcaccaagcggacctaatagacatgtacagaactctccaccccaaatcaacagaatatacatttttttcagcaccacaccacacctattccaaaattgaccacgtagtgggaagtaaagctctcctcagcaaatgtaaaagatcagacattataacaaactgtctctcagaccacagtgcaatcaaactagaactcaggattaagaaactcaaaaccactcaactacatggaaactgaacaacctgctcctgaatgactactgggtacataacgaaatgaaggcagaaataaagatgttctttgaaaccaacgagaacaaagacacaacataccagaatctctcggacacattcaaagcagtgtgtagagggaaatttgtagcactaaatgcccacaaggagaaagcagggaaaggatccaaaattgacaccctaacattcacaattaaaagaactaggaannnnnnnnnnnnnnnnnnnnnnnnnnnnnnnnnnnnnnnnnnnnnnnnnnnnnnnnnnnnnnnnnnnnnnnnnnnnnnnnnnnnnnnnnnnnnnnnnnnnnnnnnnnnnnnnnnnnnnnnnnnnnnnnnnnnnnnnnnnnnnnnnnnnnnnnnnnnnnnnnnnnnnnnnnnnnnnnnnnnnnnnnnnnnnnnnnnnnnnnnnnnnnnnnnnnnnnnnnnnnnnnnnnnnnnnnnnnnnnnnnnnnnnnnnnnnnnnnnnnnnnnnnnnnnnnnnnnnnnnnnnnnnnnnnnnnnnnnnnnnnnnnnnnnnnnnnnnnnnnnnnnnnnnnnnnnnnnnnnnnnnnnnnnnnnnnnnnnnnnnnnnnnnnnnnnnnnnnnnnnnnnnnnnnnnnnnnnnnnnnnnnnnnnnnnnnnnnnnnnnnnnnnnnnnnnnnnnnnnnnnnnnnnnnnnnnnnnnnnnnnnnnnnnnnnnnnnnnnnnnnnnnnnnnnnnnnnnnnnnnnnnnnnnnnnnnnnnnnnnnnnnnnnnnnnnnnnnnnnnnnnnnnnnnnnnnnnnnnnnnnnnnnnnnnnnnnnnnnnnnnnnnnnnnnnnnnnnnnnnnnnnnnnnnnnnnnnnnnnnnnnnnnnnnnnnnnnnnnnnnnnnnnnnnnnnnnnnnnnnnnnnnnnnnnnnnnnnnnnnnnnnnnnnnnnnnnnnnnnnnnnnnnnnnnnnnnnnnnnnnnnnnnnnnnnnnnnnnnnnnnnnnnnnnnnnnnnnnnnnnnnnnnnnnnnnnnnnnnnnnnnnnnnnnnnnnnnnnnnnnnnnnnnnnnnnnnnnnnnnnnnnnnnnnnnnnnnnnnnnnnnnnnnnnnnnnnnnnnnnnnnnnnnnnnnnnnnnnnnnnnnnnnnnnnnnnnnnnnnnnnnnnnnnnnnnnnnnnnnnnnnnnnnnnnnnnnnnnnnnnnnnnnnnnnnnnnnnnnnnnnnnnnnnnnnnnnnnnnnnnnnnnnnnnnnnnnnnnnnnnnnnnnnnnnnnnnnnnnnnnnnnnnnnnnnnnnnnnnnnnnnnnnnnnnnnnnnnnnnnnnnnnnnnnnnnnnnnnnnnnnnnnnnnnnnnnnnnnnnnnnnnnnnnnnnnnnnnnnnnnnnnnnnnnnnnnnnnnnnnnnnnnnnnnnnnnnnnnnnnnnnnnnnnnnnnnnnnnnnnnnnnnnnnnnnnnnnnnnnnnnnnnnnnnnnnnnnnnnnnnnnnnnnnnnnnnnnnnnnnnnnnnnnnnnnnnnnnnnnnnnnnnnnnnnnnnnnnnnnnnnnnnnnnnnnnnnnnnnnnnnnnnnnnnnnnnnnnnnnnnnnnnnnnnnnnnnnnnnnnnnnnnnnnnnnnnnnnnnnnnnnnnnnnnnnnnnnnnnnnnnnnnnnnnnnnnnnnnnnnnnnnnnnnnnnnnnnnnnnnnnnnnnnnnnnnnnnnnnnnnnnnnnnnnnnnnnnnnnnnnnnnnnnnnnnnnnnnnnnnnnnnnnnnnnnnnnnnnnnnnnnnnnnnnnnnnnnnnnnnnnnnnnnnnnnnnnnnnnnnnnnnnnnnnnnnnnnnnnnnnnnnnnnnnnnnnnnnnnnnnnnnnnnnnnnnnnnnnnnnnnnnnnnnnnnnnnnnnnnnnnnnnnnnnnnnnnnnnnnnnnnnnnnnnnnnnnnnnnnnnnnnnnnnnnnnnnnnnnnnnnnnnnnnnnnnnnnnnnnnnnnnnnnnnnnnnnnnnnnnnnnnnnnnnnnnnnnnnnnnnnnnnnnnnnnnnnnnnnnnnnnnnnnnnnnnnnnnnnnnnnnnnnnnnnnnnnnnnnnnnnnnnnnnnnnnnnnnnnnnnnnnnnnnnnnnnnnnnnnnnnnnnnnnnnnnnnnnnnnnnnnnnnnnnnnnnnnnnnnnnnnnnnnnnnnnnnnnnnnnnnnnnnnnnnnnnnnnnnnnnnnnnnnnnnnnnnnnnnnnnnnnnnnnnnnnnnnnnnnnnnnnnnnnnnnnnnnnnnnnnnnnnnnnnnnnnnnnnnnnnnnnnnnnnnnnnnnnnnnnnnnnnnnnnnnnnnnnnnnnnnnnnnnnnnnnnnnnnnnnnnnnnnnnnnnnnnnnnnnnnnnnnnnnnnnnnnnnnnnnnnnnnnnnnnnnnnnnnnnnnnnnnnnnnnnnnnnnnnnnnnnnnnnnnnnnnnnnnnnnnnnnnnnnnnnnnnnnnnnnnnnnnnnnnnnnnnnnnnnnnnnnnnnnnnnnnnnnnnnnnnnnnnnnnnnnnnnnnnnnnnnnnnnnnnnnnnnnnnnnnnnnnnnnnnnnnnnnnnnnnnnnnnnnnnnnnnnnnnnnnnnnnnnnnnnnnnnnnnnnnnnnnnnnnnnnnnnnnnnnnnnnnnnnnnnnnnnnnnnnnnnnnnnnnnnnnnnnnnnnnnnnnnnnnnnnnnnnnnnnnnnnnnnnnnnnnnnnnnnnnnnnnnnnnnnnnnnnnnnnnnnnnnnnnnnnnnnnnnnnnnnnnnnnnnnnnnnnnnnnnnnnnnnnnnnnnnnnnnnnnnnnnnnnnnnnnnnnnnnnnnnnnnnnnnnnnnnnnnnnnnnnnnnnnnnnnnnnnnnnnnnnnnnnnnnnnnnnnnnnnnnnnnnnnnnnnnnnnnnnnnnnnnnnnnnnnnnnnnnnnnnnnnnnnnnnnnnnnnnnnnnntctcactcataggtgggaattgaacaatgagaacacatgggcacaggaaggggaacatcacactctggggactgttgtggggtggggggaggggggaggagggagggatagcttttaggagatatacctaatgctaaatgagtagttaatgggtgcagcacaccagcatggcacatgtatacatatgtaactaacctgcacattgtgcacatgtaccctaaaacttaaagtataataataataaaattaaattaaattaaagaagactttcaccagcctattaggtgctgttgtgcagcgaacaagctgttagaacagaaagccttggagtgataaaacctgccttgacagcccaggtgatataagagcagtgctatataatgaacctgggtttgggcagcaatcaacttctcccagcaatgtggttcattgtctgctgtgagagttcttaaagtcaagcaggcttttaaaggaaacaaaccttattagtaaaatgggagctgctttgttgtgtcaagcttccagaattcgagttcttacatcttgtttgatcattagttgttactgaattttctgcagtgctgtaaaacgtcatcagaagcagcaatttcttagtgatgtattacatattctacattctccactaggtggggatattgtcttgcaaaaaattatctccacacttaaatttttaaattacacaaaataatgtataaatgtaattatagcctattgtaatagtttcaaacaacagaggtacatatgaattaaaaacaaattaaattcctccaaggtttcctctccaattccatgtcttccttctttagtgcaatatattattttgtacttattttatatatttatgtgtatgtacacttacccatttaatgcattgggctttttaaataaaaacacaaatgaggttaccctataagtaccattttgtcagcgtgctcttttatttaatataatagttcatcttggattttaaaaaaatatcagtaccaaaaatactcctaaaactagaataagagagtaagtaaggctaattatagcttattggccatgggaattaaatatattttgaaagataatttgtattttcctttgattttaaaagttatattctactcctttactaatgcaacagtcatgctcaccaaaataaataaggagtgtatttattatagtcatccatatcatactttatgacagagaggcagagtttgtttaatctttggaaattaaagattaaacaagttttggaacaatattgtgttttattttaaaatttaatttgaaaataataaattaaaatactgggcctggcatggtggctcatgtctataatcccagcactttgggaggcccaagcgagagaattgctttagtccaggaggtgatgtggtgaaaccctgtctttacaaaaaaatacaaaaattaactgggtgtggtggcgcatacctgtagtcccagctactagggaggctgaagtagaaggattgcatgagcctgggaggtcaaggctgcagtgagccatgagcatgctactgcaccccagcctgggtgacagagcgagaccctgtctccaaaaaagaaaaaaaaaaaaacttagcatgatttcttctcataacacatgctcgacaaatgttagcttctttccttctgagtaaatataacatgacaaatcgggtttgttcaagcagattattcttggggaaattatgaataagcttgtttttagaaacctgggatatgagtaatcaaggttgcaatcgttgtgtttttttttgtttaaggtaaagaagtaaaaacatgtgatgtaactgcgcagatggtgctggtatgttgttggagaagtatgaaggaagttgctttacttttaggcatgttgtgccagcttctgcccatgcagcctgtgccagaatcttctgatggattattgacggtggagcaggtaaggcacatgtttattccaccatgtataatttctggtcaacgcataaatcacttttttttttataacccaactctaaaaaaaggtttaaaatttttcttgaataaaatcatacaaatgttaactgaagaaagttcatggtaatttagaatgttagactttataatacatttcaaaactgtggcatttttagaaattttttctaaggtatataaataactgtagattttacctcacttttaactgtagttttatctctaatttttatttctccatttcacatacacagacttaaactttagcttaaaattgtcttatttagtaaaactccacaaatctcttaaattttggaaagaaaaaaagtaacatgttggttgattatggatctcatgtttcccactgcattgataataaagttgtagtcttggtttttttggctgacttttgttttaagaccacaaagttagttcaccatctgggactgttcaagtgacttgagtgcggtgtttacaagaagttagcttaccacaagcatttcatttggaaatattttagatttattagatttctgtttttaattgattccctcttcctttccatatggttttgacaaatccatttcccaccatttttcagcaaagatatataacatgtactttcatttttaactttttaaaaataaaggcaactttttccctagggtgttacaattcaagaacaaaacaaatattgtagtatgctaatgctgattatttctataataaccacatgactagttccatggaaataatgctaatactttttttctcacactctgtggcttatgttgcatgcatctggttaacagctgcgcttgtgatgttgcaaggccttgagatgaagaaaggcaaaggcgcacaggacatttcaggcatcattatgttccttattctcttccaaatcaaataggcgtcagtgtcctagagttacttgcagtcattgctggtgactggctgtagtgccaatgccaacatctttgctgaggaatccagctatgattaatgattacttcactgatgttcaccatcttgctaagaagtaaacatgtgctagaggcctttgatttcccaacttctctttccaaggacaagttaaaacatttagttttttgggtttgttgggtagtgtttaaaaaacaaattaagggaagtgtattttgcttttactgtaactaagacgtgaaagcttcctatgaacattattttgccttgacactttttacatagcacccaaatcttatgtatttaatttgtgtgcgacagccgtgttaaaattgggaattaatgtaaaataagagatgtttgttaaaaaaaaaaacaattatcacaaaaagacaggttcttataaaccaaagaattcttccagtgactgcttaaataaaaaataagatcctgactgtttttctgtaaaacattagtttccgttgtaatgaggtccagtcatttttctatgttgccattcacatggtaacctcacatacataggcgtgagaagaaactgatgactgaatgagcgatgaactgtatatgtaatagcagtgttctaacactggaaccccgtcccctatgaaaaacttgattcttcgtattgctgactttagctaaagaaatgtctcagtttaggagtcaataaaaatccaaagtcatcaagaaattagtgttatttacattactggagaattcctgcttttaaacataaccttttgccccatgaacttcctttaaattaataataattaaatatacttacatgtgcttaaaacctttaagagttaaaaatataaatgacagagaagaacatcatttacattggaatggctgggccacacctgaggtacacccttccaagagcatagttgccctggcaaagctagatctgtgcctagtggtaaaactatgagtttaagagtcaagccttaggtgaatgtgactgccgtctgaatacacggaggcagtgaagtgacttgcaggcagaatgcaaccctagttagaggggagaatgtggaacttgcatttcttattcttcagagtagtaactgtgatctacttttctctcaatggatgaagaaagccattccatacagtctaaaatacaattctattctattttgaaatttgatgacttgaatgtagatgacagtccgtttaaaatcatcctgattttacagctccttgtttaaaccggtggccacttaaatcccccatataggagtataaaaggtagggagattacagtttggggttttttgttgctgtgtggggagaagaaatggggcttgtttataattctgagttttcagtgatatattcacaaaccattagagctggaaggatcatagagatgatattatccagctctcttggacaagaggaagctgaaccctggatgttacctggtttgcccaagattgcaaagctagtttgtggcagctctggaacaggaacccagttcttctccttgccagcctgtgttctgacatggcacagtgctgcctttgtgagctgctcatttaatttttctttaagtttaattttctgtatttcccatatccaggtaaattttcgcaagcaacaggacagtaagatgacttgctactgaactttttcttaaatgattgattccctagagcacttcctgtgaagcagtgtgctgtcaccagtttctccaggaggaaaatgtgttcattcagaggcatgtctgactttcctccttcactgtaatcacataatgaaaggttctttcatagtgttcctgtacaagaggcagagataaaaccaactttgagggatgtaagtggagacccttcaagagtaagcagtacacacaaccttatctcacaacttcctgactagttgatgtgtgtggagttttcaaacttgatgttttgctgatgtagagcttttgcttgttatattttgttggttctcttttcatgggctatctgatacccagtgcctactgattttttaaaacagcttcctccacctggagtactatatgaacttaagtttatatgtatttccctaatattcttaaaaagaaactactaggtagatttttcattcatgctttccctctgcagtaattatcgccacagaaatcacacgagtaagattgccaactattagaaattgctattttaaaacattcttttttagtttagtttttttttttttttttgagtctgggtcccattctggcgcccaagctagagtgctgtggttccattttgactcacttcagcctcaacctcctgggcttaagcctcccaaatatttgggactataggtgtgtgctaccactcctggctaatttttgtagagacgggatctcaccatgttgccaggctggttttgaattcctggactaaagcgatcctcccacctcagcctcccaaagggctaagattacaggcatgagctaccatgcccggtctaaaaattgtatgttagattctgttgtaacttttatgatgcccagagttaactacattgatgtattccctcagtagtgtcttttgttattactttagattttctgtaatgaactacaaatgggatatatgtttattcacaagtcttaaattgctttttgtattttcttttgccaaagtttattttttagaaattacaaataatttcattgaattgcactcaatgcaagttcccatttttaagctttgaaatgaagttgtgcatgtaaccacatcctatttattgactgccttactacaaggatatcgtgggaaaataaagaagtacatagtatgtggttctgtgacgtcaaagggcttagaaatacaatagaggataccagacagaaattcattttaaaaagtcagactacagggcaacagttaacattgcccatggttaagaatttgctagaaagcaaagaataaacattctggtaagatgatatctgagtggtagaaaattattacctttgttgttttgtaggagaacagtgtttgagctttgaagaaatcccaaaagttagtaacaaatcactgtaggagagaaggtacagtttaaaacattaactgttttactggagtgtaaacttttgtaaaacatcccgtttaaccaaagtgaaattagaagtggctgtgtcttaaagtcagaattcaaattaaggcttagggattaaggctcactactttatagtataaaataaaaataaaatggacatttactgtttgctactctttgccaggtactctgataaacacttaaatgcataatcttattatttatttctcacaataatcctgtgaagtaggttctagtgttagctccatttcacaagtaaaagaactgtgtttaattactttgcgttagtagtacatttcagaatttaccttctctagataaagggtagatttaaaatatatttatattttttttaatgggttttatgctttagatgagcatttagatcccctaattagtctgttggtgaattatacctgcctggaaacatggcatgtagcttcttcccctgtggaaatttataccctgtgagtccataaaacatgttaatttccctatagagatactttttatgaaaagttaagagcaggatatgctaattttaaaaagacaagtgattagaatttaaatttctgttctttaaattttaagaacagaaatcactgtatttttctttcactttgatcttaatttcctttataaaaatcctgagatgtatgttattaaaaattattttgctggaggtaacatactaccagacttcaaaatatactacaaacctgtagcaacaaaaaagtgtggtactggtgtacaaacagacacatagaccagtggaacagaatagagaacccagaaattaatgtatctaccgccaactgattttcgataaaggctccacgaactctcattgggtaaaggactgtccaataaacggtgctgggaaaactgagtatgctttcttcatatgcagaaggatgaaactagacccacctctcactctatacaaaaatcaactcaaaatgaataggctgggcacggtgggtcatgcctgtaatcccagcactttgggaggctgaggcgggcggatcaagaggtcaagaaaccaagaccatcctagccaacatggtaaaaccccgtctctattaaaaatacaaaaattagctgggcgtgtggtgtgcacctgtagtcccagccactcgagaggctgaggcaggagaatcgcttgaacccaggaggcagagatcgcaccactgcactccagcctggtgacagagcgagtgtcagtctcaaaaacaaacaaaaacaaaaaacagaaattaactcaaaatggataaaagaccttcaaaacaataaatggtaaagactactataaaactacttgaatagtggtatttattcaggacattgatctgggaaaagattttttctttttttttttttttttttttttttgagtctcgctgtgtcgcccaggcttgagtgcagtggcgctgtctcgggtttaaatgaacctctgcctcctggcttcaaacgattctcctgcctcagcctcccaagtagcttcgattacaagcatgtgccaccctgcctggctaatttttgtatttttttagtagagatgggatttcaccatgttggccagactggtctcagactcctgacctcaggtgatctgcccgacgtggactcccaaaatgctaggattacaggcgtgagccaccgcctggcctgggaaaacatttttataaataagacctcaaaagcatagacaacaaaaagtaagtgggattatatcaaactaaaaaccttctgcacagcaaaggaaacaacagagccaaaagataaacttcagaatgggagaaaaaaatttgtaaactattcatctgacaggattaatgtccaaaatgtacagggacctcaaacatctcaacagcaaaaaaaaaaaaaaaaaaaaaaaaaggacaaatgatctgaacagacatttctcaaaaacagaaatgacgaacaaatatatgaaaaaatgttcaacatcacaaatcagggaaatgcaaatcaaaaccacaatgagatatcatttcattccagttaggatggctgttcccaaaaagacaaaaaaataacaaatgatggcaggaatgtggagaaaagggaactcttacaccctattggtgggagtgtaaactagtatagctactgtggagaacagtgtggagattcctctaaaaactacacatagaaataccgtatgatccagcaatcccactactaggcatttatccaaggagaaggaaatcagtatattgaagagatagagtgctgcaaccccttgattgaatagtgttgcaatcccatgtttattgcagcactattcaaaatacacaaggtacgtaatcaacctgggtgtccaacaacagatgaatgggtaaagaaatgtggtgtatatatacagagtggaatactattcagccataataaagaatgaaatactgtcattcgcagctacatggatggaactggaggacattatgttaagtgaaataagccaggaacagaaaattaagcactgcatgttctcacacatgtggaagttgaactcgaagtaaaaattagagcagaggatactacaggctgggaagagtagttgagagggtggagataggtagagttgtgaaaggataccaaattacagctacataggaagaataagctctagtgttctttaccacagtaggatgactatagtttgcaataatatatatatattaataattccaaatagctagaagcaggatgttgaatgttcctaacacaaagaaatgataagtgtttgaaatgatggataagctgattattctgatctgatcactatttattatatgtattgaaacattactgtgtaccccataaatatggataattatttgtcaatgaaaaagaatttttaaaaatgctttaaaaaatctgtcttcataaaagggtttacatgtctttattatttcaaggtgcattttaatttttgatgttattgtaaatccatctttataaaaaatacatatttgaactttatcttgctgggctataaaaatacaactgctttttaaatatttatcttatattcatccatattactaaactctattattttaatcatttgtggattatttgtagattatatgtccataatgtcacctgcaaacaagagttttttgttttaaatttttattttactttaagttctgggagacatgtgctgaacgtgaggtttgttacgtaggtatacatgtgccacggtggtttgctgcacctatcaacctgtcatctaggttttaagccccgcatgcattagatatttgtcctaatgctctccctccccttgccctccacccaacgacaggccctgatgtgtgatgttcccctccctgtgtccatgtgttctcattgttcaactcccacttatgaatgagaacatgtggtgtttgattttttgttcctgtgttagtttgctgaggatgatggcttccagcttcatccaagtccctgcaaaggacatgaactcattctttttttgtggctgtatggtattccatggtgtatatgtgccacattttctttagccagtctatcattgatgggcatttgggttggttccaagtctttgctattgtaaatggtgctgcagtaaacatatgtgtgcatgtgtctttatagtagaatgatttataatcctttgggtacatacccagtaatgggattgctgggtcaaatgttatttctagttctagatccttgaggaatcgccacactgtcttccacaactgttgaactaatttacactcccaccaacagtgtaaaagtgtttctatttctccacatcctctccagcatctgttgtttccagactttttaatgattaccattctaactggcatgagatggtatctcattgtggttttgatttgcatttctctaatgaccagtgatgatgagcttttttcatatatttgttagctgcataaatatcttcttttgagaagtgtctgtttatatcctttgcccactttttgatggggtggtttgtttttttcttgtaaatttttttatgttccttgcagattctggatattagacctttgtcagatggatagattgcaaaaattttctcccattgtgtaggttgtctgttcactctgatgatagtttcttttgctgagcagaagctctttaattagatcctacttgtcagttttggcttttgtcgcagttgcttttggtgttttagtcaagaagtctttgcccatgcctatgtcgtgaatggtattgcctaggttttcttctagggtttttatggttttgtttctttctcttgcctgattgctctggccaaaacttccaatactatgttgaataggagtggtgagagagggcatacttgtcttgtgccggttttcaaagggaatgctttcagcttttgcccattcagtgtgatattggctatgggtttgtcataaatagctcttattattttgagatatgttccatcaatacctagtttattgagagtttttagcatgaaggggtattgaattttatcgaaggccttttctacatttattgagataatcatgtggtttttgtcattggttctgcttacgtgatggatcacgtttattgatttgtgtatgttgaaccatccttttttttttttttttttttttgaggtggagtctcactctgttgaccaggctggagtgcagtggcacaatcttggctcactgcaacctctgcctcccgggttcaaacgggtctcctgcctcagcctcccaagtagctgggactacaggcgcatggtgccactcccggctagtattttgtattttagtagagacgggggttttactgtgttgtccaggctggactcgaactcctgagctcaggcaatccaccagcctcagcctcccaaagtgctggcattacaggcatgagccaccgtgcctggcctctttcatattttttttacacttttcatttcttcttattttagtgtgctggataggggctccagaacagaattcagtagaagttgtgacagtaggaacccttatcttgttcctgattttaaagaggattaaaaaaaaacacacaccaaaaaaaaaaccctacactgttgtctgtgatgtttgcctattgggtttttataggtattctttatgatgttaaggaagtttttgtctcttccaagtttgctaagaggtttttttaaaaaaattatgagtcgaaaaaaaggaaaagactagaaagaaatgcaataaaaattaatagttacctctaaaaaattattttgtacatccattatccattttgtgaaccttaaatagaaactcagtggtatctaataggcaattgagttggagttttcagaggttttcattttaaagtgaaaattcagagattttcattttaaaaatcaaattttgaaattgtttctgattttgttgttattaattttgtaagtggtttgagttaagtctgtttcatgtagtctgattatccactgggaggctgtcagcctggtgtgtttcttctctgttcagctgctcatggactacactgccaagcccactagtcatttgtaatcggattcttctcttccttgtagccttgtccttactgttttctagcacgaaacctctaggtcactcagccaggtttacttacccttgtctgtgtatgctcattcattgatatgaaaagacctagcaaagtatctggcaggtagctggcacgcacttatttagtgttggtctattcattctagtctcccagcctcttctcatgttaattaccctctttcattttggtccacccaagtactgtaatagcctgttcaagttctggatgtgaagtgttttctcattattccagtgcaaaaggatctttcattttttggaacttatgcttctaatggacaccagacagcatgttggttttctttgccaaagtgaactaaaagcctgctgaggacaggcatcttgttttcatcttttctatctaccacagcattaagctgtgaagcattttacatggtgctaaagaaagactgttatctaacaggaattttacattatcttcaaaaggaaaaaagataataagcctaggtattagctatgtgggtttattcggaaattattaagtgcaaaatgaaaggaaaaactgcctatatctcagttttgtccttagaacatcaatctgttttctgtgcccaggaatacctagggttgaggtccatccttgagaagaccacccactggtcatacttctgaggtctttgatttttattatatgctttttgttttagacctcttcgaagggagtttgaataaaggaagcaatgaaaatctgatgtttgcctaaggagtaaattatgaactgttgtaaatccacagagaagcactttgtcagtaatgacaaagtttatgttttcctgaagtatgttttaatatctgcaacattttgggaaaaaaattaaggaagttagagaaacctcatctcattgactttctgtttttattttctgtctttaagtaccttcttagaaatctcttgtttctctaataatcgaaatgatggtcattacaaataagctaactggtggttcttctagtccttattttgtattagtattatttttttaagctggctatcatgagttacttattttataggattatcgggcttcagccctattttaggggtttaattcggatttaagccttgataattctgttcaaacaatgctctgaaattaccacattgaagacaaaataaggcttacctgactgtggctcttgacaactggtagtatgtggtctttaaaagatactaaaatcaagagtatcatcagatctttacaggaaaactaactgaagaacatgacctgtcactctttgggatactaaagagttagaattttttttaaaaaaattattatatactgcttttttggttctttgttagtctcctatctgattcttgtttctccatgtgtatcacttattatatctttataatcagatgtactttgagtgtggattacgtctttagttttcctctatttagaaccctagtcagaactcatattgaactgaattggattataggttctgggcctgttctgagcttttcagtttattacttattttaatacaacaacctgtgtcctaaatactggtattatctctagtttatggatgaggaaactgagatacttgcccatgatgacatgtttaactacttattctactgtttatcatctctaatgtgtgcagaatactaatctagtccctatgctgagataggaggtgtttctaggtaagcatatctgagatatcttgggacaacttgtcttttaccatcctgtgatctgttggggagacctggatcaagagatagctggttacagctttggtcctgagttttatacaaaatcttgatttttaaaagacaatagttactaaatctaatggtataaaagcctaatcagcttaaaagttaattctattcaaaaccttagtcaacaatgaattgtccgttttgttttctttaaaataaataatctggccggccacagtggttcatgcctgtagttaacagctactcgggaggctgatgcagaaggactccttggggcccaagagttggagactgtagtgcacagtgatcacacctgtgaatagccactgtacttaagccgaggcaacatagcaagaccctgtctctacaaaaaattaaaaaattaggtgggtttggtgacatacacttacagtcctagctgctcaggaggctaaggtgggagtattactgtaacctcaaactccttgagcctaggagttcgaggttacagtgagctatgattgtgccactgcactccagcctgggtgataaagcaagaccagaccctgtttttttttttttaaaaaaagtcatatttgttatttgtctaatcttgtgtggagaaagacagcatgtaggaaagccactgggtgacattctggcaaattccatggttctgtcttgaagtgaagcctagtagtttttcaggaggtcctttgcaccacatcttgcattgtcattaacaattttatgtctctaaaaggtaatacgggttattttttaatgggtatggagtttccatttgggaagatgaaaagttctctaaatgcatgatggtgatggttgtacaaaagtatgaatgtacttatgccacttaattgtacatttaaaaagggttacaatgataaatattatgtatattttaccacaataaaaaagaaaaaaaattttaaaagaaggaaaaaaggtaattatttcacctagacctatgtgtgtgagtgttgtcgctttgtgtgattttctgttggagttgaataacatgagctataacagaaaacatactgaggtttgtgaatgtgacataggaaggcagttctagtgtagcagttaaagatggtcaactctggagccagactgcttggcttcatgttctggttccattgctttcttgctgtctgaccttggataagtttcttagcctttcttggcctcagttttccaattgtgaagtagagataatgatcgtacttatttcatggaattactgtgaggattagatgagctattgttaaaaaaaaatacttaaaatggctgggcacagtggctcacgcatgtaatcccagcactttgggagaccaaggtgggcagatcacctgaggtcaggagttagagaccagcctggccaacatggtgaaacccatctctactaaaaatacaaaaattagccaggcgtggtggcaggtgcctgtaatcccagctacttgggaggctgaggcaggagaatcacttgaacccaggaggtggaggttgcagtgagctgagactgtgccactgcactccagcctggacaacagagcaaaaatccatctcaaaaaaaaaaaaaaaaaaaaaagcttaaaacatgttctgtcatatggtaagcgctaaatgaatggacccctagacctgggttctaaacagtgttactgatataaatacacttgcgaatgtaaacataaatcggacatttgtttttgctttttttttaaaggtaaaagaaataggagattactttaaacaacaccttttgcagtccaggcacagaggagcatttgaattggcttatactggttttgtgaaactcactgaagtactaaacaggtaaaacaaatatccttttgtgtacgttttaaaaagactaaatatacaaagcatatgcttggagtagaatttagttgtgtcttttgaagtttaaaagaataagacctggttgactacaaaactcttggaagaaattgttttcttaggtttcattgtatgatttactgcagataactgattgaaacgtccaaactgagttattattctgtcattgaaaggtgatttgaagcaaactcaaagattttgctaaaaatagctttgaaattactgttttttttttattgaatgaaataaatgttttgtctgtttgaaaattacttggtgtttggaataaaacaggccttgcaatttttggggtttgtattacagaagcacttaaggattttggtttttttcttcataattttatcgtatagaaaagtttaaaagaacagtaagtagactgaaaagtagaaaatatttttttccttttacctggaaaactacttagatagatttcatatatttaaccaaatgtatttcttgacattatagttacagataatttcattcattcatataatagatttcctccaaagagcttgtggggaaaccttaaattacttaatgactaagtgttcatggcaagtgttctctaaataaaaggtagtattttccaggaaaacatttccattgcctggaaactttttgaaatgaagcagagttctgccagccttgtagcctcagcaaacattttattttaggctgttaagacatctattccttgaatatttttgaaactttttttttcacatgcctggtaaaaacatttataaaacattttggcagttatgggctgcacagaatgtctttaaatgatactttttaaaaagtccctgacattaaactgctgatgttgaaaatattttatcttttcaactttttgtttccagtgtagatatgacttatgaacttttttttccctcaaaacacaacacactccactcctatcaaatcagttaacaagaatgtatgaataccagcagtgtgcttagtactgtgcttggtttggatgatattatggtttttttataagatgaagttcctgttattaaagagcttatgttttagtttgagaaataagtagagatgaaattcaaaatatttaacaaaaggtatgttgtgagcactgactggtcagaaccaacactggctgtatacagcacccagcatctctctgtgtgtggatgtgtgtggactgattaccagcctggaagtaagaccgacacacttgaacaagataaaactgccaaattttgggtgaaatttataaaacatataggaatagcagagagagaaagcaatggggataggctggtagggcttcatggaagaggtggaatttgtgctaatgcatgagttgaaagaaggaaacattgtgagtaaatgttcagaggctagaatcagcaaggtgaataaataaacctccttcctgtagtggtggagttggtaggaaataaccaggcaagttgatagattgaggccaaattatagagtgtcttggaaatagatttactgtagcagggatggagagaggcatcaaacatttttgctctgaaatagatcataggaggcatcatagaatggaggaataccagtaatctgtgactctggttcttagttctgtgtatattcattccatttattggcaatgagattgtacaaaaattaacctccctaacctttgatctcttcatctttaaggaaaagggtatttgccctattgacagatctctggcttttgttgtatgaatcaaataaaatagatatttaagaagacctctttgcattatagaatttcctacaaatttaaaacatgagattgatgttggttgtggggttggcatgtaaaagcagttttctggttggaaatgttaggttagatagattgtaatacagattatagtaaggagagcctgcaatcagttataacaaagtagatctgaggtgatgagggcttcctcttgggtggtggctctgggaatagagacaaacatggggttttagttaacttttgtccccacatagatagtaacaactcctcacatgatgtatgcttagaaggaaagctgtggacacattttattacattcatggttttgtatctcaacaatttgggcagggctcagctgggtgattcttccttagggtatttactgagttcagttggtggcattcagctggcagatgaactggtcacaagggacctaagacaacttcactcgcatttatggcaccttggtgggactagctagaaggctgggcctagttgggactacatgtagcctctcaccccagcatggtagtcttggggttgaaattcttatatggcagcttgcttcccccagagagagtattccaagagaatcagccagaagctgtatgctcttttctgacccagccttggaagtctcattgcattgctttagtcacattcctttgattttaagtgcatcttaggaccagcctggattcagtctaccttttgacagcaaagtggcaagatcatattgtagaagtatacgcagataggagatgttgtggtagccatctttgaaaaacgccatctgccacatgaaccaactgaatgtgaatagtagaggttactagggagttcatggttgcttctgtgattctaagtcttggtcaccagacaaatggggttgatgttaacaaaacaaaggaagttgaaagagggaatggtttgataaagatgagtaagtttttttgttttttatgtgttgagtatgagataatgatggcataccctggtggaaatacttaagtcagatgttagagataggggattagtttgggtgatataacaaaaacagagatgtagatctgtgagttttctccaaaaatatcatagtaagattgcagtctttggtggagagcatgaaaggaaaaaagaacagaggtctaaggacagaggcttttgaataactgtggttgaatggtacagttgaaggcattccgaataaatggagcggggagactagggaatgcccaatgcctggtatcttagcccctcctaatctagtttaaagattttctcatggctgttactgttggcttttaaccaacctgttaggagttctcagctgttgctttcaaaccaagtagttcttgatccctttagagacatttcaaatctgctgaacagaatgttttgcagagaacatctttacagtgtgtgtggcttccttttgtttggtttttatttttaaaagaaaatttgtttcttttggagcccttttgagagcgttttataagcccttaagttatgaaaaagttgtttaggcatacaacatttaaaaagtttgcaaaaagaaatctgggcattcatgaaaatccacagaaatggaggccaactgctggccacctcttgaactacagctgtgttaaggaaggaagcacttaaagagattaatggataaataactgaagagttaaacatgacccacattgtttgaattggtttttaataggattatgcaaaatgtcttcaaatataaactgacttcactattaaacaatcatctaagaataaatagggatggagacattgttactttttctgggaatgttttgaaagcaacacttgcaacacacataacacaaatagtgtgttgagttaattttctgtaatctgatttttttatgtcgtgctttctatttagaagtcagtgaaatattcctgttctccttaaaaaacatcattgcttgcctgtgcataattacttgtctaagcatttgattggagtggttaagtttgttaatgtcataaaactctaaattcaactttttggtgacattcatatttgcttgtttactttctgtgatcttattatttgaagtcgttcttctgatgaaaatgaacagacttctaggatgttaagttgggaatccaactttaatttgtccaaccgtaagatacaaacttaactataaggggataaaatcattgattataattctaaatctagaagggagatttattagtgcttgatgttgtcttactcttcaaatattcgaattgctttacttgtaatgtagcttaatctacagatatttattgcagtaattataatcattttcacattattggcctgaaaaaattaaattgtgacatttagtagtttttgtcattaaatactagtactgactcatggacatcaacaattctgtggacagaaatcatttaaatatgtatttaaactttcatcagttaattatagctaccatgattcaaattcaacagaaaacttttgatgagcaatttaaatataatactgaaaaaataatttcttctacctttctggagaatgaaagaccaagtctctaaagaatatgcagttgagaaataaataaatgcagaatgtaatatataagatttggggaagagtcattcagctttgaatgaaagaatatacaatcttgtgtaaactttatttttaatttaatttatttatttgagacagaatctctctgttgccaaggctggagtgcagtggcatgatcttggctcattgcaacttctgcctcctggcttaagtgatcagaatctgtctcagcctcccaagtagctaggacttacgggtgtctgccaccatgcccagctaatttttgtattttttgtagagatggggtttcgccatgttgcttaggctggtctcgaactcctgggctcaagcagtatcccacctcagccttccaaagtgctgggattacggacatgagccaccgcgcccagcctaaacttttatttacatttcatttgggaaatgtgtctaaataagacactatttctcactgagtgtcctattaattttatttgaaatatgaataattaaataaagaataactaagagatgagccaccttggggagccatattcttttttttgttttgttttgttgagatggagtctcgctgtgttgcccaggctggactgcagtggcgcgatcttgcctggggagccatattctttatagagagaaaaatccttttaatttcccttttctattgtggattaaaagaatttggagaaaactagaatgtcttgatgtatacattctaagtgtttgttaatgattcctgcatttttattttcatttttaagcctactgtaatagttgagtcagatattactgtttttcctcgatatttgaacactcatttaaaaagttttcataataacactttgtcatttagacaatagcagagggactttgttctcagtgagtaacctctatgccagctttttaagtaaagttttagaatttttttaatattaatttttctccttgatcttagggaatgattatattaaataattgagagaaccagctatctggtacatcttccaatgacttcttttaatccactgtatcttgtccttctccccatggccctctgattggtaattcaatttagatttggtcattgtattattgcctgtgcctgcagctaagtcttcaaaatagccccctaatgttttagcctgcagtaagcctcaataatgtatgatagtggtgagggaggttaagatggcttctcttgatatgtagctttctaacaggatttcatttgggcaaatcatttttcaggcttaaagtttcctggtgcttcagggttgtgttcctatttaaaatatacatgcaaacaaccttcctgcacacatctattagtgtttagtttcattgaaataataaacatgaactttgaaataataaatataatacttgaccaaagattgaatggagttgaatgggaatttagcttatgaaataattagagattgggaaaatctctaagttagaaaaaataaatcatactgaaagagtttgaggaaatgaaggtgacatttctcagttagcaatagtaatataagttaaaaatagctctgtgctactacatgtagttggatggatgaagccatttaaaagccactttgtagtcagggaatcggatttattggtacaaaataattgtctaatgaccagttagttgggtatacagcttatgtaatttgattttagtctgcgggttttattcttatcttagaatacttatccagtgggagtgagatagctctgtggataggagttggagtaatctgtttatggaacaataatttgcttcagtgatctgctcaagacaatacaaaggcctgaatagcagctatagcctggcctgttcacttctgttacttttagtaggggcttaggccatagcacttagcataggaaaacagcaacaacaaaccccttaccttttttttgagctggagtcttgctctgtcgcccaggctggagtgcagtggtgcaatctcggctcactgcaacctctgtctcccgggttcaagtgaatctcccacctcagcctcccgagtagctgggattacaagagcaaaccaatatgccaggctaatttttttgtatttttatagagactgggtttcgccatgttggccaggccagtcttgaactcctgacctcaggtgatccacctgcctcggcctcccaaagtgctggattacaggagtgagccaccacgcccggccctccctacctctttttgtgcatctgcctgcctgcctgccttcttgtctgcctgccctcctgccctctttccttccctctttccttccttcttccctccctccctcctttccttcccttccttccctcccttccctaccttccctcccttccctaccttccctcccttccctctctttcctcccttcccttccttcccttcctatccttcccttccttctcttccttcccttccttcccttcattccttccctcccttccctcccttccctccctttcctccctttcctcccttcctccctcccttcctcccttccttcttccctccctccctccctccttccctttcttttttcttccctccctccctccttctttaagaatttctactcttcataccgtgctgctttctaggttctgattgggaaagtcaggattttggatataaaagactgagggaagctggatacatttttagtaagcttccttgagaactggtaaaccgtttgttgttgttgttgttgatatatatgtgtgtgtgtgtgtgtgtgtgtgtgtatatatatatacgtataaatatttgagatagggtcttactcttttgcctaggctggagcacagtggtgtgatattggctcattgcagcctcaacctcctgggctcaagcagtcctctcacctcagcttcctgagtagctgggactacaggtgtgcaccaccatgcctggctaatttctttgtattttttgtagagatgggcttgtgccgtgttgcccaggctggtctccaactcctgagatcaagagatcctccggccttggcttcccaaagtgttgggattacaagcatgagccaccgcgcctggccatattttgtagattaataacattttgtgttactgagttgtttatgatgaaccttgaaccccttttaagaaggttgcaattttacaatgtactcagaggctaaagacactgtatattttgtattaattcgacaagatagccaaataaaaacaaaataccttcagacaagaggctgtctgcttatttagtggaaaggcattcactaacaaaagcaggattttggaattccccatagctgtggttggtgactacatagagttggctcaaagaaccaaggactgtttcactcgagaacctttctttttatatccttgctaggccctggattgtgtgatgaagaaccaaaacaaacaactagggtttgctgtattgttcttgggaaccttgcatggtttcatttttacctctcaattccttcattatcataaacaccagcaaccctggagttttgaaatcacttccttataaagaaatctttccttgctggggagcagacagaaggttcattgaatagtcagaactctattctgctttttataggcacagtgacctcactattgagaagacttagggttccagctccctgctttttatacctggtttgtcaattttatgcctacctgcaggcacagctaatgtgcgccagctggcaccagcactagttgctccttaattattcaacaaaagatttcttaaacatctactgtgtgccagatgctgtgtttgactgagctctctttgaccattgagaatatgatatggtaggccacagttactgtgaacctagacataattaccagagtctaaataggaaacatataactgtggaagtaagagagggatgtgaggacttgaataagggactaaggattgtatgggaccatgatgaggagttttggggacattctcatcaggaactacttatgtattttagagtcattatcttctctatataacccagggaatgttcattgaattttcaaagcatttttattttattttcattctaaagcactgagaatcaagtgatttatctatagctacacatgtagttggtgattgagccagcactagaatctaaatgtttttctggaatttcatagcatttcagaggttagcagtttaacaaaagtttattgattattgctttctataaggaattgtgatagctaggataaaaatattgataaaacatgggccttgtttttagaggaactttcaacctagcattttaatctttgggattagataagtaagtcacataatttacaagacagacgttaaagaccaagacaaagatccgctcactgaactgtctatcctaggtgatgagaagaataattaatgccaataacattggcaaaaagcaaggcaagcaggagggcatgatgggagggagaataatgctttaaacatgctgagttaaaggtagttttgggaggctgcctagcgggatagcagacagttggaaatacaggtcaggagattagcagaggggtccaggttggagatagtgtgacctgggactcccccaatattttagcagtaaatgtccagcattctgggaaatcctttagtcccaggcaaatagggacagttgttcactccagctggaggtatatgtttgaaagtcagccaaacagaggaaatagatgaagctatgggcctagaggagatctcctaaagaggcttaagaaagaaaggaaaaagttatcatcttgaattaaattttataactattgttaaaactcagagacattgctcatatgaaacatagtttctactctgtgttcataagtgtacaaacctcggttaaataacacttttacatgaacctgaactatacttgcttttgaaccctgtacttggttttgttcttgggtcttagagaaaaaatgatctcttggggtagcagttaggttaatagagttgattttggtaagctgtttggggatttcagtaggaaatattcttgtatgaatactataaccctggtatgtggagatttgctgaatgtgtttgtacgtgttacaggaagctaagcagctgcatcaactgctggctcttaacagtggcacttctcattggaaaacatttttgtttgtactttcttttctagttattataccctctttctttgtcaacctggtttgttagactgccatattcaatgaagttagtaaattatatgtcattcatttattcaacaaatatttattgagctccctatagggtatcaggccgtgttataggtgctgggaatagagaaataacaggaaggaatgtgtccttgatacatggagatgtagaaaataataaactatctgctagcagtgtgtgtttttatgtgataaagtttggtggtaaggaagattctttcctactagactaaagtaatatttcagccagggcctgaatggcaagaagcagcaccttttctggagaagagctttccaagcaatgagaaccactaacgccaaaatctatggtgtattaaagaacagaatggtgtaagataaagtttaatgagattgtccagatacgtagggctttgtgagccaggatgagtttggattttttgctccctgggaaatctttgtgttttctgagagtctccaaccacatgtatataaaaatagaaggtatcttggaaatggtacacacattaatatttatggaccctagtaggtaacttcaagattacgagcaaatgaagtgcacgtgcgtttgatagagttgcatggaagcggggaggggactggatgaaaaaatgagaaacttcatggatgtgtaaaataaatggacataaagtttctgttcccagaaagtatactattcctttctaagctgccactttgttctttaacctaacaaagtgaaagtctgtgtttatgggaaagggaaaggattttcttccttcttgtgctttgtaagtaaactattgtttggtaaataaagatattggcagaggcttacccttactcagttgaggttatacaaattaccttcctggcagtttgagtcttttctgggaattttgcttcaatacgttggctttaaatgtacttcatatttaaatgtgaaattaattgctttgtgtttgcaggtgaagtaatttcttcaggctaccatgaatcattcagttaatataagaaagcagtttattaatagtaataaacttccccagttccctaagggagtgggggtacctcgaaaacaaatgagacacaattcaattcaagtcagtcacaaaaaggttatctactgagtggcttttctgtagagtattttaattttctagctagctctctattcatgtcacccagttcatttagaactattaatactttaacccccaccccaatggtagatgttcagggaatgaaatcaatctgaaaagtaacctgaataaaacatgatcaggaagttaatatcttaaaaattgtattctctggtaatacattccaaagccacatgaaaacattttgtaaatcacgtgccctttggaatttttattctgcggttctatttttaggacatagcatagtgcaaagcaaccactagctacctgatagatctctttaaaaaataaaatagtgaaattcactaaaacaaatattagagagttgatagtattttcatcatgagccagatctgagcatttagggcaggcacattgaaataatgcctttttattaggcaagggctttggtgtcaatatacattttaattctccctctgccacgtacttgctatgtaaccttgagcaaattatttagcttccgtctcttctacccccttattttacccaatttttaaacattagtgtgaaatatttgcatgtactagaaggtatagtgaatactaaaattagcagttgtacaaccacgatgtaaatacctggaggaagagtattcacggcagagagaatgtcaggtgaaaaagtcctgagaggcttgggcttagggtaggtatttaaggaacatcaggtaaaccaattatgactggagtagtgtgagcataggaaagagttgtagatgagatcagagaagttgtgaggactagacagcctaagacattgtgtaagaactttggcttttactctgagtaaaatggggagccattggagtgtttgtgaacagaggagtgacatgatctcatcttttaaaaggattactcttacttctgtgttgataatagactataatagtgaaaacagaaagaccgattagttacaatattgctatactacagaaaagagatagtgatgacttggaaagtggtggaggaagtaaaacgtgatctgaatctggatgtaacgtgaagatagagcaggcaaggtttgttgacagattagatttgctatttgagagagagagcataactacaaagtttttggcttgagcccctgaagagatcgatttgttattcttttattaggatgggcaagactgtgggtagagtaggtttttggaggaagatcaggagtttagtttggggcatgttaagtttggcatgtctagtagacaccccattgaaactactttaggtgtactttgttgaagtacatcctttagaatttcttttggtgagagtctctggaaggcagacttaatctttgtatatttcagattgtctttttcttacctatgcttttgaatgtactttaacggggtatacaattctggtggacagttgttttccttcactgcttttgttattgccagtgagaaacttgtgtttggtataattgatgttcctttgtagatctccagttttttttcctttaaatctcctgtggcttgtaagtttttttattaatcacaattttgctatgctttttccaggtatggaactatcgttatgtatatacacacacatactttatggttttttcattctgtatactgttttgggtaaatttcccagaaaactatcttctaagtcacgaattcgttagaattcatcttatctgttttatatgtgtgtgtgtatatatagtttatatatattatatataaaatattatatattatatattatatattatatataaaatattatatattatattatatattatatataaaatatataatatatataatattatatattatatataaaatgttatatattatatataaaatattatatattatatataaaatatacgtaaaatatatattatacataaaatatatattatacataaaatatatattatacatattatacataaaatatatattgtacatattattatatataaaatatatattgtacatattattatatataaaatatatattgtacatattattatatataaaatatatattatacatattatatataaaatattatatattatacatattatatataatatatatttatatatatattatatatattatatataatataatatattatatattattatatacaatatatatattatatataaaatatacatatatataaaatatataaaatatatataaaatatacatatataaaatatacatatatgttatgtatattatttatattgtgtataaaatatacatattatgtatattatatattatatataaaatatacgtatatattatgtatattatatatattatatattatatatatattttttaagacagggtctcactctgtcacccaggctggagtgccttggcatgatctcagctcactgcaacctctgcctcttgggctcaagcgatcctcccacctcagcctcccaagtagctgagactacaggcaagtgccaccatgcccagctaatttttgtatttttttgtagagatagtgtttcaccatgttgcccaggctggtctcaaactccagagctcacgtgatctgcctgcctcgtccttccaaagtgctgggattacaggcgtgagccaccgtgcttggctgaaagtacacttttatttctagtcttttttatttttatacatgcctgttcttatttcactacggcttgtttttcatgatttcttgttctttattttttttttttttaagggacagtgtctcactgtgtcatccacactggagtctagtggtgtcatcataactcactgtagccctgaattcctgggctcaagtgatcttcctgctttagcctcctgagttgctgagactacagatgtgagccaccatgcccagttaactcttcttaaatagaagttattcccttatttatcacttcagtatcctaaacatagttattttaaggtttttgtcagactgctccataaaattagtttcatatagagtgaatgtgtgttattactgatttttttaggttgtctttcttaatataaaatttatttctatattttgaattttggctcactggctatgatgggagccttttgtttactgatctctttctaggctctttcctctctatcagaggaactagattaggtagtggtattttgggtgtcccccttcacagtgaaattggggatatcatagatctagtcactgagttagtagtcagcctgattcagaggccccctgtgcccttggcttttcctactgctacagcctcaggcagctctggcagtagccctttttcaggttcttctcaaaagagatgaggctgctgaaattctttggctgccactactgcttctaaatctgtaactcttgggtctctggtatcagcacactcactactttgcatttctgttcatttttacccagatgattatcttgcttttggactcagctggttttggggtttctatttgtatattttgcatattgttaacattaacttgcattgtagggggatgtcctgtcaaaatggaaactcagctgtttcatctctatcatttcaattgaaacttttaatacttgcttttctcataataaccgatgattttagaaaatgaccattaagaacttattagacataagaacaaactcaatccttccaaaaactgtcattttatagaagagcaaagtgagaaaatggagaaatttagtaaattgccttggattgtacagctactaggtagcagagaaaggattctaaaccagataacacgggtccataatctgtgttcctaaccactgtgatatattccctctcatctgttagttgggaaaaataactttctcatagtttgttccaagaatgaagtaagagcagctgtgaaaagcctggtgtcgtaccagacgtgtaatagacatccaacgaatatttgtttttctttcctttgtggcaggcaaatatatttccagtatgatagtttaaataaaacttgtggccgggtgcggtggctcacgcctgtaatcccagcactttgggaggccgaggcaggcggatcacctgaggttgggagttcgagatcagcccgaccaacatggggaaaccccatctctactaaaaatacaaagttagctgggcgtggtggcccatgcctgtaatcccagctactcaggaggctgaggcaggagaatcacttgaatctgggaggcggaggttgcagtgaggcaagatcgcgccattgcactccaacctgggcaagaagagtgaaatttcgtctcaaaaacaaaacaaaacaaaaacaaacaaacaaaaaacttgtaagtagattttgtttaaaatgtagtatgtttaattttagtaaaaagggagggtggaagttccattattggaccaaattcccttgtatggctttgaggtcaggacttgcctgggagaggtgcagagctgagaagcaagggaatcagaggaatgggaaccggtggtagagttcacactggaaaccagataagtaaagaattctgcgtaaaagctggtttgatgctggggaattccagagcagaataagaaggtttggactagatggtaggagctggtgccttgagcatttcccagagctcatgaggttcctgggtccatggtgcagtgggcagagatggctctatcgatggcattttgccagccttgaccttgtagagcattcttctggcctctgttttcaaattctgcaaattaacaaggagcatttggttcttagtatgcaatactcaagggaataaataggcccagttcactgtttacagttatactagccaagtgtttaaattagggaattgcctctggggccttgacctagctctttccccagtcatctcatcttttacttcctcagctctcatatatggaccttccaccattcgacctacatgtccttcaaagtctagttcagattccagcccttccatgacactgtactgatcccatgtacgcctaatacctagtagttgcttcaagttaattggaagtttagagaaaggaaaagtcctcgtgagatgcagtatttggaggaagtttcatcagtttggatgaatagggatatgtgtggagaccataaacgaatgcttagttgggaatatgaggtgtgtgtgttgtatgttagtatgagaaccagcaaaaaacagtcttactagaccagaggagtttgtgtaggaacttggaaaagttaaggttagatttaagtaggagggttgggtccaggtcataggcaacctttcaagctaggagagtttgacaaagttagaagaggagttagatgatttggttaatagtcaagagccactgaaagttcatgcagggaagggtgatgcatagtgagatgttctactctcattccagacctgccttcttggagtggttggttttgccacagcctctgcgggctcactcagggaggcccaggggaggcccactgacagttgaggagcattattgaactagtatttagtgtatttgtatttcagcacacttaggaaattaaggaaataggaaagtacctctcatgtcctgcagttcgttcttccccttagtttttcctacgtagcaaatcccctacaggagacgaccttagactgtagcattatctataagctggttttaactttcccatggttctaggaagaaaatgcaagtataaattaagcccacagatattagatcaagtactctttaccttattcacctctataattccagcttcttttcttcttgggtagctaaatcaccaaaaaaaaatttttgcttttttttttttaaatttttttagttttttttgagatggagtcttgctgtgtcacccaggctagagtgcagtggcgccatcttggctcgctgcagtctctgcttcctgagttcaagcgattctcctgcttcagcctcccgagtagctgggattacaggtgcccgccaccacacctggctaatttttgtatttttagtagagatagggtttcatcatgttggccaaggtggtcttgaactcctgacctcaggtgatcctcccgcctcagcctcccaaaatgctgggattacaggtgtgagccactgtgctcacccggcccaatttttttttttttttttttttacagtgaagaaggaacaaaagaaggcagtaatctatatcattagcacttaagtaattactcttaggaatttggatttcagtttttgattggtcaactgtgtgaggattatatcaagctggcaatattattaatagagaaattatttcacaaaacacaagacatttatcttaatttaaaaagatataaaatctagtgcttgggaagtaacctcaatccttaaaaatacaaaagtgtggggcaattattttcattatgaaaaattccaaacacataaacgtgtgtatttgtgtatatgtatatcacatatatttaaaagtagagagaataataagcgacctttacccatcatccaaattcaatagtgatcaaagttgagtcacaactgcttcatctatccctttttattgttgtttgctgaagtattctaaaacacatccccgatttgtgatttttattcctatgtactcagtatgcatctctaaaaatatggaaactttgttccatgttcacagtgcagtggcacattttataaagaatttcttgatgttatctattatctagtacgtatataaatttcctctgttacttgacagtgtctgttttacatttcattgttcaaatcaagatctaagcaaggttcacacactacatttggttgttatgtctctgaatcttttttaatctagtggttgggagttttgatagctggttttggtggctgaggacaggagtgtcaaagaagcaagggtgaggtgatggattttaagatatgctaaaaggaaatctttagaatcacagagcctgctagtagtagggagatgtaattgtaacttttatgactgaaataatatttttaggcccatgtcaaactttaaaaaatgcctcctttaaagtagtcttatttatatattttgttctatgtgaaacatatagctgaatctgagttgctatttagaatgtttagtcagtaactgaagttatctgttttacaccaaactagaataaagaaaaaaaaatcccaatgttcctaagagatctaattctcactgtaaattggaaatcagttatctttctgcaacttttcttcctcaacttaaaaaagagtgtttttcctttggactttatctgtaaattttcatatattaatttcagttaaaaccaggtactaccttgctaagataattgtgtctacctaccactgaatttggtattccttgggcaatgttatacagtctagtagggcatacatttaaaaattttataaaaattaaatgtacttgagcactctaagatagcgcttaatgtaataatgcagaagctcactgatgtaatgttcaaatcgcctcaaaatgtttatgcctcttcccagataaattgctttaattctccagaggatctggttgaaaattttgtggtaggcctcattttgagagagatgaaaatgattactaaaatacagtttaaaatgtgttttctttgaatatgtgtaatccctataaacatagaacataaattatagtaaactataaacttatattctctttgttggaaatcttgagttgtatagtatgaaatatctgtgagaccatgatcaaccttttcctgaatattttgagtgtggatgcaaacccatgtatcaaaatttattttgcagacaagacacatgctttaaacactgcagttgttagaaatgaaatctttagatcttaagacccataataaagaggaaagtaggtgaaaagtatgagacatgttttagtttcacccccactcaatataaggatatttattatttactaacagtgtaaatgtgcatcaatagtttgtacttttaactttgatacctaattccgaatatttgattatatatgccttttaggtgcccaaatgtgagtctgcaaaagctgccagaacagtggctatggagtgttttagaggaaattaaatgcagtgatccttcatctaaactctgtgctacaaggcgcagtgctggaattcctttctacatacaggtatttatctgtaggaccctagctgtttgtttatatttgtcttttgatgatagtgtatcctaacctgtttgacgtgtgagtgagcgtattacacataaaggacatttctgtcttttcagcaccatagcatttgtggctttgttttaatgtggggatggtgtgttcctgtgacaagatctgttcttggaacaaaccctctaaaaggtcaatcttgtaatataaacagagggtggtataaatttctgtctgtgtattaagtaggcagacatcactgtggcacagtcattgctcacttccaggaagtgcacatgttaccccaccaccccactgtatttttttttaaaaatagtcttcctttcatctcaagaccttcaatactctctgtaggcaaccagtgttaacattttcttttcaattctcctataaaacgtccatccataaaataatcatgatcataatagtagctgacatttattagtggttatttcacctcattaactccttccctgtaccctattatcatccatatattctagatgaagagactggggtttaggtacgttaagtgacttaccaaaggccacagagacagtaagaactgagttaagacttgagcccaggcagcctgactcccgaacctctctgcatatgagaatatgtgtgtgcgagtccgttttccttttgaacacatatgaaaacatacacactgcttgctctttgatttcacttagtattataccttaaagattgcttcatatcagcacatttagatatggctattgatgggaaaatattttatttagaaattaagactgttaccttcatgaacccaaagaataaaaaccagtgtcttcacaatactaaatcagaccccatcctgaaagacctttggttaatatatagtaagattaaatccgggaatatggtggtataataaaagcactgaaaataaatggaatgaagtctctgatttttttcatgcccctacattttttccttatctttcttactcctccctcaaattcctaaaatccctttatgattttttggtgacagtgggcatcagttgcagaggttgttgacagagatcattgaagtagttctgctgaatggattttggtgaccttcagaaatcaacttttatttgatctgacccattctgtatcagtgtgtttcattctcctgcctctaattcactctgaccttgtgtttttacgtgtcatttgtctgtctgagatcaaatgttaagacaggatcaaggtctcactgcatatttgtgcagtgtgcttctttcagctctggtgcccaacttatactaagtattggtcataatgagtaatcagtaggtgtactttcttaccctagccttggcaagaatgccataactttacctagctctttgggagaaaaaagccgtggttccctgaagtcattttagtaattgaatgtagcttttttttagttgaatgaagtctaaatttttttttaaaaatctgcttaaagagagtcttcatttctcttagcgtgacttactaataaagttatattcctgttttggtggaaatctgcttagtgttagctatggaaaagaactgtctacttagtttgtgagtttaccttttgtgtagacagattaaaaaatattttcaatatagacataaagtttttttgaatagtcatttaaaaaatatatgttatctgagcctaaataaactatgagaaatttcttctaaatcaaactattttttgtatgtctttattttcctcttctgtagttttcaaatgcttcagaagaagctaactaacttgtaactttcactcttgagagccagtagctacaaacatgaaaagtagacatggagaaagggagtctgggaatgtgactaaagtgacattttttaacagctttattgagatgtaattcacatactatatagtcacccttttaaagtgtacaattcagtggttttcagtatattcacagaggtgtacaaccattatttagttttagaacatcaacccatgaaacctcccatactcattagcagtcacttcccatttctctctacccctgccactcagccctaggcaatcactaatctaccttccagatctatacatttgccctttctggacatttcatatatatggaatcatacagtatacgatcttttgtgtgtggcttctttcacttatcgtaatgttttcagagttcatccatgttgtaatatatattagtacctcattcctttttattgcctcaagtggcttaataccctatttttatgtttattggacatcggcaaagtgttagatacaaagtaagtaagaagctactgaaaatttcaaatataggacctctttggtgtttgcagtatttctttttgttccatggagtttcaaatgctttgatttgattagtcctccaagtaatgattcttttgtgaagaattaactaactgcttcatctccagggaggcttaacattcttacaagaattttaatccagagattttttgctttttaagtaaagagaattttcttgttagataaatttgttactgaaactgatttgtttattttatcagagctgccacctacttaggattcttaaggagttgtcaataagagccattttttggccttttagaattataaaatttaatgagcaaagtggaagtgaccttagagatgacatgatttcaccttcacctaaatttagcgatgaagaatctgtaggttcaactgtgaggttaaaccacttgcccacggccacatggcttaattaactttctttgataaccacatgtttttattaaggggattttgcattttgggattgatccagggaagcagcaaacaagtatatgtaaactaagaaccctgttaatttttgcattctttttccataggcactgttggcatctgaaccaaagaaaggcagaatggatttgttgaaaataacaatgaaagagttaatctctttggctgggcctacagatgacatacagagtacagtcccccaggtaatcatggaaatacacaaaccctccagtgttgttttttgttttgttttgtttttcacttttttcaagacggctgttaccgtcttgttacccaggctggagtacagtggcgcgatctcagctcactgcaaccttcgcctcccaggttcaagcaattcttctgcctcagccgcctgcagttgttttaaatctttgctttattttttaacaaaaagtttctgctggagataaagaactcttgaacattggacagacatttgaagcttgtttgaatagtttttctctccttcttttttttttgtctttaccatccacaaaataaaccgttgctttagttgaatatattaatcaaagcaaacaatttttaaactctggtgaaaacatccagcttatataagatattttataatactgttgcatctatgaatttgaaagtgcatatgctagcactttagaatttcatgtgtgcttctttgcgttgatgtacattttgtaactcagcagttgaaaatttcctttaaatatggtatctaccttttggggtgttcatattttactagcatttagttccttttagtcactacctacatatatgaagttaaagcactcctcatagctccacttcaccactagggagtaaatattaataactatcaagtactgcttgtacgttatagtctggacttcctcagttaatgcttcatagtaggacactcctttttggtttgtttgttttttgagacagagtctcactctgttgctcatgctggagtgcagtggtgcgatcgtggctcactgcaacctccgcctcctgggttcaagcgattcccatgcctcagcctcctcagtagctggaattacaggcatgggccgccatgcctggcaaatcagctgaggtcaggagtttgagaccaggcccaatcacctgttggccaggttggtctcgaactcctgacctcagggatctgcctgccttggccttccaaagtgctaggattacaggtgtgagccaccatgcccagcctatagtaggacactcctacccaactgtaaagggccatgctaggtcagggaacagattgagagctgaagtttacaatcaagtacgataagtacatatgattttatttcagaacctgtgggaggtgttaaagagagcccacaggccagaatgaggactgtggaaaagaaaggggattttatgtttattggatattggcaaagtgttagataaagggagcccatgggccagaatgtggactgtgggaaagaatccccattcttttccacagtcatatggaacatagtcatatggcacatagtggccagtacccatagatatgaaatgtctttatttctttaaaaaattgactgaaatgttgttaatcaccattcaaaaatgatcacttcaagacatttttcagtgaaatgtgaaaaaaatgtaattggttctattttcctagactatcacttttaaaaagtacatgttgagtatcttttatctgaaatgctggggaccagaagtgtttcagagttcagtttttttttttattattttggcatatttgcattatactgaacaggtcagcatctctaatctgaaaatctaaaatgctccaattagcatttccttagaatgtcatgtccgtgctttaaaaagtttcagattttggagcttttttgatttcagatttttggatttgggatgctctacctgtgctatttttataagaacatctaaaaataatggggcttggttttaacgagtgctggataattattgccctactctacttcaaggtgattaatggcattttagtgatcatttttatgaaattggtgagatttaaaaattttgtctctgaccagtcttctaagcttttttagttgataatttgctttccttctcccctcccagggttcatttctttattatttttattatgtatctttgaaatatttcagtatacagaaatgtatagtgaataatgaacatatttgaaaccagttccagtttaaaaaattaaacattacagagaccgttagttatgctgtggattcttccacatctcattcccgtttattcctcctcagttataatcactaacccaaattagtgactatcattcccaagcattttcatcatacttttatctccttttacatgaatgttgttttcgacactttttatactttgcttttgtcaatcaacattatattttaagattagtaagctcctgttcagcccctgttcactttcatttctgaacagtattttattctatttcatttcatcccttctgtgaatggacatttaggttgtttcccgttttcttctattacaaacaatgctgaaacaaacattcttgtgtgtctccttacacacgtgagtgtttctccaggttatatacctagaagtagaattgcagggttgtagggtacacacatattcaatctgatgctgttatgttgtctccaaagtggttgaactaatttatattcctgccagcagagtataagagtttccattgcttatcaacacctttgtattatcagacttttacagtttttgactttctgcttagtgtgaaatggtgttttctagttttattttgcatctttcttattactagttagctttaacatcttttcatatgtttattagccttttggtttatatatgaaagttgtctgttgaaagactttgcttactttaatattggttatttgtcccttcatttttgttttgtaggagttggatttttattgttgtttcaaaaatattttcttgatattgatttctttttgattatttgaattacatatatattctcccaaactatgttttctctttttactttgtggtctctattattatgtagatatttttaattttaataaaatagaataggtcagctttctcctttatggttgtacatttggatcttatttcagaaattataccccaagatgggaaagacattttatattttctttcttttttctttttctttctttcttttttttttttttttttgagacgaggtctcactctgtggcctaggctggagggcagtggcacgatctcagctcactgcaacctctgccttccaggttcaagcgattctcctgcctcagcctcctgagtaactggcattatagacttctgccaccatgccctgataatttttatatttttagtagagacgaggttttgccatgttgaccaggctagtctcgaactcctgacctcaggtgattctcccgccttggcctcccaaagtgctgggattaccggcgtgagccaccacacctgactgagaaagatattttatattttcttttaaaagttttcaagttttacttgtcataattttatgtaaatgaaaccatattattattttttactgataggatcttgctctgtcacccaggctggagtgcgtgcaagtctttatattacctgtaatttgtctttgtttagtgtaaaataaaataatttaatgtttgccatttggataactaatacagagacatttctgttataacacatccttttcttcttgatttatactgcgtctgttatgtgttttcatagataggtggttctgtttctgtgctgtctattaatctatctttggagcaaaaccacagttttatttttgtttcaacttttttgagatggagtctctctctgtcacccaggctggagtgcagtggtgtgatctcggctcactgcaaccttcaccacctgggttcaagctattctcccacctcagcctcctgagtagctgggattacaggcatgtgccaccactcccagctaatttttgtatttttagtagagatggggtttcaccacgttggccagactggtcttgaactcctgacctcaagtgatctgcccgctaaggcctcccaaagtgctgggattacaggcgtgagccaccacacctggcctaaaaccactagtttaattattatgtctttataaaaagttagaatatctggcaaggtgaatctctctttttttgttttcccttcagaatgaccttgggtatgtttgtcctattgctgttccataaaaattttagaattagcttgttaaactcaataaaaagcccttttggaattttggttagaatttaaatgtattgatttatttgggaaaaattatctttttaagtattgaatcttccatgagcatggcttatttctccatttattcagatcatttaatgtcatttattattttttaaactaattcccataaaagtctctcttttttttttttttttttttttttttttttttggagttggagtttcgcttttgttgcccaggttcgagtgcaatggtgcaatcttggctcactgcaacctccgcctcctgggttcaagcaatcctcctgcctcagcctcctgagtagccgggattacaggcgtgcaccaccacgcccagctaatttttttatttttagtagagacaggatttcaccatgttggccgggctggttttgaactcctgacctcaggtgatccacctacttcagcttcccaaagtgctgggatcacaggcttgagccaccatgcctggcccataaacgtcttatagattatttttgagatttatttctaatgtctttttttttgcaattatgaatggtacttttaaaagattatattatctgttgctgtttgagaagaatgcagttaatttttgggttataattgtgcttgtattcagcagcctatcagaattgctgtaacacagcaaatgacttacctgtaaattcttttggatttgttttatggataatcatacctttgacaaataatgctaagtttgttttaactttctattttttagttttttcaaaacagtttttattgtactttgctgctggaacctgtagtaaagtttggtatagaaagagagatagcaggcatccttatgttgtttctgatcaatctgctgcaatttttaatctacccagtatcttattaaggaaattgaattttattgaatattttttgcatctttttagataaatatgttttcttctagaaaatgcagatgtcatgaattgtattgatttttcaatttatctttgcattcttgcatatctcactggttttgtgagtgagactggcctgtggttttcctttttgtgctgtgcctgtcctgtctttttaaatatgcatcttttgatggaattatagtacatatacagacaagtgtacaaaccatatgtgtacctcagtacagtttcacaaagtgaacacatttgtgcagccatcaagaaatagaacatttctagcaactgaaagccccctcttgctctcttccagtccacatccttctctccaagagtaaccactagcctaacttccaatactctagttttagttttatcttttttttgagttttacataaatgagaccatacattattattatttttttattttagagacgggatcttgttctgtcactcaggcttgagtggagtggtacagtcttagctcattgtagcttcaaactctttgataatattttttatttgtgccttatttctcttctctcttcttggttagtcatgtcaggggtttatttctgtttcagagaatcagcttttgggtttgttaatgctcttagttgtgtttttgctattttaaaagtttctgctctaaatttttattttctttctgtgtttcaagtttattgttgacttattttctcttgacttaattcgtcacttaccacaatcattctagtcatttaaaaaaatagaagcatttgagatgtacatttttttttgaatttcacttaagctgcatcctacaagtattgatatgtaggtagcgtcttcaaaatatttaaaaaaaaaaatttgaccagtgtttaatgtgcttgaaaatgtgccgattttaagcatttttttaggccgggtgcgctggctcacacctataatgccatcactttgggaggccaaggcaggtggatcacctgagatcaggagttcaagaccagcctggccaacatgttgaaaccctgtctctactaattatacaaaacttagccggccgtggtggcacatatctgtaatcgcagctactcgggaggctgaggcaggagaatcgcttgaacctgggaggtggaggttgtagtgagccgagactgtgccattctgttccagcctgggcgacaagagtgaaactccatctaataaaataaaataaaataaaaaataaagttttttttaaagtttcttaattccatggtgatcagagcataatctataagttattaattacttggtatttgttgagactttatttgtggctaggtatgagggattttagaaaataaatgtttcatgtgtgctcgaaaagaatgtgttgtctctgtattttaggtgcaggcttctacatatgtccattggatcaaacttttttatagcattgtttgaatcttactaattttttgtaaaatggtttatcagctactggatgtgttttattaaatctgctatttcatttgcggattatccatttcttgtaattcagtaaattttttgttttgaagctgtactattggatatgtgtagatttagaattagccatggttttcaacccacaactaattttgaacttcttgttttaggttcatgctttaaatatccttagagcattgttcagagatacgcgcctgggagaaaatattattccttatgttgctgatggagctaaggctgcaattctgggttttacatcaccggtctgggcagtaagtgctgtcactatttattttcattgatttaattatgcttctgagtaggttttaataaactaatctttcactgggtgataaaaaatatttcctgccctttaccatgaattttcttagaaatctttggatcaagctacatttttgattcttgatatttcatggttccattttcactcatttgttggcttgttagccatctttcttttttttttaattttattgattgctttagggtttacagtatgtatgtttgactgatcacagactactctcaagtgatattacaccatgtcacttaaagtataagaacttaataatagtgcacttctgtttctctcctcccaatctatgtgctgttattgttacacattttacttttatgtgtgttgtaaacttacactacattgttgttatttttctttaaatagccagttatatttcttttcaatttaccactttaaccgtttttttaagtatatacaatgcagtggcattatgtgcattcacaacaacatttatcagcactgtgcatttctggaacattttcatcatcccgagcagaagctctgtactcattaaacactaactcccatctctcatctccctcacccctagtaacctctattctcctttctgtctctgtggatttgcctggtctaatacctcatataaatggaatcgtacaatatttgtccttatgttattggcttctttcatgtagtatatgaagggttgatccatactgtgtggggtggggggctgtgtgtgtatattggtttatcagtatacacacatcccacattttctttttttaatttttatttaagttccaggatacatgtgtagaatgtgcaggttttttacatagatataagcgtgccatggtggtttgctgcacctaccaacctgtcatctagttttttgtttgtttgtttgtttttaattgagttggagtcttgctctgtcacccaggctggagtgcagtggtgtgatctcagctcactgcaacctctgcttcctgggttcaagtgattcttttgcctcagcctcccgagtagctgggactacaagtggatgccaccacacccagctaatttttgtatttttggtagagagagggtttcactatgttagccaggctggtctcgaactcctgacctcgtgatctgcccaccttggcctcccaaagtgttgggattacaggcatgagccataacgctcagcctgtcatctaggttttaagcccggcatgcattagctatttgtcctgatgttctccctcccttcctgactccaacaggccctggtgtgtgttgttcccctttctgtgtctatgtgttctcactgttcagctcccaattatgagtgaggacatgcagtgtttggttttctgttcctgtgttagtttgctgaggatgatggcttctagcctcatccatgtccctgcaaaggacatgatctcattcctttttatggctgaatagtattccatggtgtatatgtactacattttctttatccagtctatcattgatgggcatttggtttgggtccatgtctttgctattgtaaatagtgctgcaataaacatatgtttcatatatctttatagtcgaatgatttatattcctttgggtatatatccagtaatggcattgttgggtcaaatggtatttctggttctagatccttgaggaatcaccacactgtcttccacagtggttgaactaatttacatttccaccaacagtgtaaaagttttcctatttctccacagccttaccagcatctgttgtttcttgactttttagtaatcaccattctgactggcgtgagatggtatctcattgtggttttgatttgtatttctctaatcatcagtgatgttgaactaccacattttctttatccaaattcatctgttgatggacgtttaggttgtttccactttttggctattatgaataatgctgcaatgaattataatgtataaattatctgagtcattttagttcttttgggtatatcatatggtaattccatgtttaactttttgaggaatgaacaaacttcttccccagcagcagcaccattttatactcccatcagccatgcacaagttccagtttgtttagatctttaccaatactcgttatctttttttttttgataatagccatcttaatgggtgtgaagtggcatctcattctgattttgatttgcatttccctaatgattaattatgttgatctggaaacaaaacaactctgagcgtataaatgtgtctgtattttggatgctgtggactctgctgttagtatgttaagttagtgctacaaataaactctatcaaaagtttgaaaaaacgagacactcgcaaaacattgaaatggaagaggttaaatactgagtcgcattttcttttgtaatatgttcactgtccagaagcattttgattcaaaactttaaagataatgggcaatacccagtacaattgttggatttaagaaagtaatttttcgtgtgttttcttatgatttctgggagaaacattatagtttgttttcctatatcatgtcttctagagtaaggagaataattatagatgcttgaaatgtggcttaaagtaaaaagtctggcaaagggagaagagaaaagaagctagatcttaatacattacctgcagagtggagtatttactagaaagtcaggctttccagttagtaagctgcacaaaccatttcttacctgtatgataagcctctaattgagagtaagtattttgcagtgaaagccaaaggcacagactcccattgtgaagaggaatcctttgaggttgccaactcttgcctagaaaattgtgcgtcttcctgtaagagatacacacttctggaattctgtctaagagcattgcataactactcttgaggacacagagtttaccttttatacttacaggaagtagagcaatgcctttatactgtcagtagagtcagagaggtaggaatgtggcttgaccatcaggaatactggagatcataaaagtgattgtcagaaatatcaatattgctttcttgaagccattagttccagatgaaccaagaaatattttccgtgaaaggactttctgagagtgaagcctggtgattcgtccaactttttagtaaaattcaaactatcagaaatgagtgattcattttttttttgaaaagactattttttgagaccctaaacagtaatacatgtgcactgcagaaattttgaaaataaagaaaagcataataagaacagtaaaagtcacctgttaaattaccgtacagatatgagcattctgattcattttctttctctttttttatgtgtgggctttacatgtgcatagtacatgtatgcatacatatccacaaaaggctgcataaatatatataaatgtttttattttctttctaatttcataatactaataattttatttcttgggatcttcctttttaacactttatgaaggaaacatttctatttagtttgctttactagaggaaataaatatcatagctataatgatcaacactgttacttaatattatcaatggttatattttcttctgtataaaaatctaagataaaatttatgagtcaacctatttaatggatgtgaagaagtattcacttacaaaaacaatttacaaaagcattctctgttgaagtgattttaagtgtgatttttccttaatgcatacgaaatacggtttgatttgcagaactttgatttgtacacatcctcttgggaatataactgtgcctaaagctggctacatctgtacttttgacttgattgtttttcctgataagttagggaaaacacacatgtaaaatgaacttaattttaacttgcagtaaagaaacatttttcagaaagcattcatgtatatatttaatttgtttttacagactccttagtctttcgtattgaaaccatacagatctctcaaactttgctacctagtaggcattcttaaaatatagggaaatgtagtatgtaaatattttcggcattagacatatctgcttactgtattgtagatgttatgttaagcactagaaatacaaggatagataacacataatcataataatggctgtcttattgagtatttctcatgtacctggcataatttacattgcattgattatcttagtagcttctgttatccaggtatgttctgttataatcctcattttacagatgaagaaaacaaggctcagagagatgaaataactctgcctaaggacacaaaactattacctgtccaactccagaatgtgtgctattgtagaggagatgtttgggtattttaagaatacaaagaaggtacattttacctaccttctagggttttggccctattttcttattaaacagagctggaagtaaagcccgggtcctaacattttattgaatggtactaaccaagaccagcaggaatgaaagaaaaagggaagtgaggcaaggaaagatgaatgatattaccaagggaaccttaaccttgcagaaaatctgagctggttgtcttgtacatggtgcatcttctagccagaccatgtgaaactaccaccttttggaacagcccaatatgtttgtcttttactggtcaaagttcatccttggggcattaccacaatttgggcaggtgttggcacaacccttgggcagctgctagggaagccagatcgcatgtccagtgatgtggcatctcatctgagtctgaaagtggctggatgaaccagagcttccatggatatagttggaacagacctgaggtttgaaataatgacttctactgtgttgaaaagctctgcatgaaagaaatttatagcaggggagtcatgggatgtgattgatgtaggtaaaagtggagacttgattgtaagatagcaagagggaaggaagaagaccagtcaggaagctattgtaatagttctaccaaaagatggtggtggctcagcaaagatggggaaaagtgatagtctttaacatattatttatattaaaaatatttcagagattaaaccaaccagtttagttaacaatctaagttaacagaaagtaatttgtggaacccgagaatttactaggcagtttttgtttaaaaatatcactcatctctctttattatgttcagtgactaggggaggcctgatcttctttccttgcatcctcatcctcattgcagaacaggcaattctcggctttcccagtggagcccgcccaaaaaactccactgagtatgccacttagagtctttctaagacccacactgggtttatttttattttggacggagtcttgctctgtcgccaggctggagtgcagtggcataatctcatctcactgcaacctctgcctcccgggttcaagcgattctcctgcctcagcctcactagtagctgggactacaggcgcatgctaccacgcccagctaattcttgtatttttagtagagacggggtttcaccatgttggctagaatggtctcaatctcttgacctcgtgatccacccgccttgtcctcccagattgctggaattacaggtgtgagccactgcgcctggcctatatttttatctggtgtatatttagcttgcttcccccagggtaatctggttcatagcatgcagtgggtttcaaaggagggtaggaaaaagatcctgttagatctgcccagtagtgctgccatgccatggctactctgtgcctctgttggcaccagcatctccaggccctctgataattatgaggttgccacaagggtgctacactgagagctgtgtactgctgaaacctagctgtgctctattcactgtgccgcgtgccttggcatggagcttcattgacctagaggaagagggaccttttttctaattcactcatatgtactatatgggctagtttaaaccctgtctcttcttttgtctgctcataggtgaagtgtcttgctactttggaagagggtcaccagaaactctaggacatggctggccctccctttaatcataggcccagaaatcccagcacagttttcctggattacagatgatagacttgtgacccaaagttttaactgtcttttcatggtcacatggctaagaagtgatggaaggcgaattagaacccaaatctcatttagttttctcagaaaatatttttttctgctaccacgtacacaagacaaaatattaagtgtcatgtgtggatcccatccttaagaaattgactgcctattaaggatagggtgtgtggtgtgtaaatgaccatattacatagcaattgcacatagtaggctgtccattcatacttttcaaatatttttcaagggagcatttctattatataagaaaagctatatacatagataagaaaaatatacacatatatacatgtgcacacacacacacagaaggctttgtgtaacccagttttaattaccaaactgttctgtattttttttttttttttgagacagagtctcactgtgttgcccaggcttgagtgcagtggcgccatcttggctcactgcaacctccacctcccaggttcaagtgattctcctgcctcagcctcctgagtagctgggattacaggcgcccgccaccaagtccagctaatttttgtatttttagtagagatggggtttcaccatgtcggccaggctggtctcgaactcctgacctcaagcaatccatctgcctcggcctcccaaagtgctgggattacaggtgtaagctactgcacccagcctcttctgtatcttaaacgagtctacatgaaagctttttcatgcaagaaaggaaagaaaaagttatacactctgtgaatagaagagaaaaattttggtaacagttgtcagtttgcagttgaattccaagttcctatcaaccatgtatttagggcttgatggagaaggaggtcaggagcaggaagtgcttccctcgtgagaaggatagattttagctgggattaaagtcatgcattacttaatgacaggaattaattctgagaaatctgttgtttgggaatttcattgttgtgtgaacatcatattgtatacatgcacaaacctagatgtatagcctactccacacctaggttgtatgatatagcttattattcctaggctacaaactgtacagcatgctatcatactgagtatgctaccatgctgagtatgtaggcatttgtaacacagtgttaattatttgtatgtctaaacatagaaaaagtacagtaaaaatacaatattataatcgtatgggactatcattacatatgtggtccattgttgaccacagcatcattttgtggttcattacagctattatcatttctccatttttagctgtactactgcttacccttttctgtctttactctcctttttacttattaatggcaataactgcggttacttttgcaccaacctaatgtgttttccatctatccttccaaaaagggacatgttttattgccaatactactaatgtattactcacattaagattgctatcaatgattcatattagcatttattgtcagtgaattaggagttgataatgtagtttgttagtcacaacctctttctcaattctttgtctacttcagtttcctccttgttagctttatttatagtggatgggaacagaaaatatggatgaaatagtaaaacatacaaagcaatacctgaaacagatatccttgaaccattcatactgtcacacagaaatctaggggacactcttctgtcttaagtaggaagtaggctttcatgccagttattttgctctatatttacaataactcttttaagtgttgttctgtataacttacagaattctaaaacagagtatgtatttttcaacctataaaaatcaattacagtactcccctcctcaaatttgaggaggatgcattccaagacccccagtggatgcctgaaaccatggttagtactaaaccctatggattctgttttttcctatacatacatacctgtgataaagtttaatttataaattagatatcataagagataacaattataacaatagaccataataaaagttaagtgaatgtgattgctctcaaaatacgttagtgtactataccacaggtaactgaaaccacagaaagcaaaactgctaatgagggaggaccattgtaatgtaatatactgtgtgaatagactaaagaacaaaacccacattattaagcagatacaaaagaggcatttgacaaaatctaatgctattttatgtgaaaaaaaactaagaatggaagggaaatttctcaacctcagtggaaaatccagagtcaacaatatacttgatggtaaaggactgaaatctttctctctaaaatcaggaacaagacaaggaaatccactcttgtcactcctattcaacattgtactggagttcctagtaggccaactagagaagaataaaaaataaaagttatccagtaaaggaagatgcaaaactatctctattttctgatgacatgatcttaaatatagaaaaatcctaaggaatccacacacatgcaaattaaagcttgtctattagcaaggtttcaggacaaaaggtcatcatacagaaattgtacactagcagtgaaaaatctaaatgaaattaagaaaacagtttcatttatgatagcatcaaaaagaataaaatacttaggaataaatttagcaaaggaactgcaagagttgttcactgaaaattatcaaacattttttgaagaaattataggcctaaataaatggaaagatctcctgtgttcatcactggaagacttaactattgttaagatgacgtattccccaaattaattaatctatagattcagcacaacctctgttaaatcccttctagcttttttttttttttttttttgcagatcttaaaatacatatggaaatgtgagggacccataatagccaaaacaatcttgaaaaagaacaaagttggaggccccacaggtcccaatttcaaaacttaatgcaaagcaacagtaaattagagcttgtggcattgacataaggttaggcacataaatcagcagattaggattgattgtacagaaataaacccccacatttaataaaggtgccaagacaattcagtagagaaagaatagccttcaacaaatggtacggggacaactggatatccacatgcaaaagaatgaatgtgatccccatctcataccatattcagatgactcaaaatgtcttaaaaacctaaatgtaaaagctaaaactataaaacttgtagaagaggacctgggtaaatttttgtaccttggattagataacatttagttagatatgacacctaaggtacaagcaatacaaaaattgataaattagactgggaatgaaaaaaactgataaattagactcgatcaaaattaaaaatgtctggctgggcatagtgacatgcacctgtagtcccagctactcggaaggctgcagctggaggattgtttgagcccaggaattcaaggctgcagtgagctatgattacaccactgcactccatcctgggcgacagagcaagaagctgtcttagaaaagttaaaaaaaattttttttaaataaagcttaaccagcatcaagaaaaaaaatgtttttcaaaggacacaatcaagaaagtataaagacaacccacagaatgggagaaaatatttgcgtattatacatctgataagagtggagtgtccagaatatataaagaactcttataactcaataataaacgacaacccaattttaaaatggacaaagaatatttatctccaaaaaagataggcagatggccagtaagcacacaaaaggatacttaacaccattagtcatgagggaaatgctacaatgagttaccattccatgcccactaaaataaaatgcatggaaaataactagtattagggaggatgtggagaaattggagaactggtgaaattggaacgctaatacattgccagtgagactatgaaatggtgctaccactttggcagttcttttgaaggttaaacatagagttactctgtgaccaagcaatactacttctaggtatatagtcatgagaaatgaaaacatgttcacacaaaaacttgtacatgaatattcttagcaaaattattcataatattccaaattggaaatagcccaaatgtccgtcaaatgaagaacagattttaaaaatacggtatatctgtacaatgggatattattaagccataaaaaaggaataacatactgatacatgctacaacatgggggaaccttgagaacattatgctaggtgaaagaagccaaacattaaaggccgcatactacatgatcccatgtatatgaagtatccagaaaaggcaagtttatagagacacaaagtagattgtgctttcctactgcaggagaatagggagtgacgactaacggctcccgagtttcattttgaggtaatgaaaatattgtggaatttggttagtggtgatagcttcacactttgttaatatagcaaaaaccactgaatagcatcctttaaaataataaattttatatgtgaattatacctcaatttaaaaaagtaatttaaaagtgattttaaaacaatcatgcagtcacctttggaggttggtatggcatgaactaattattctgaaaatgatcaatatatggaaataattctttactaactgatgaacagggtaaccaaatagcagatgaggaaaaactttaaaaaaataaagtttttctgaggatgtaaatgattaatgcagaaggcctatagaatattgtgattttgctgcacctaatggaaaatgtaatgatcatcattgatcgctaatgagggcactttataagggatatcttagtcccttcgggctgctataacaaaataccacaaatttatttcccacagtttggaggctggaaagtccaagatcaatatggtggcagattcagtgtctggtgaaggcctactttctggttcatagatagcaccttttagctgtgtcctcacatggtagaagtgaggcagctcactggggcctcttttataagggcactaatcgcattcgtgagagctctacccccatgacttaattatttcccaagggcctccaccacctaactccttggaggttagaatttcaacatgtgaatttttggggaacacaaatattcagaccatatcaggatggatcaggcagataggattagaactgtctggtccatcttaatattactaaaaagacatgtgtctcctgccgtcagtctattgaatcaaaggagttttgtttcagagggtatccattcactttgtaaaatagtcctctacagttttgtttaaggtgtgcatttctcaacatctccaggcactcctgttttaattttactgcatctggcagcctttgtcagaaagtatggcttagggcaagatggagtctgtgtttctgttttccttttctttttgtgtttttgtgtgatttctgagaggagagaaggtcccagatatctttaccaagtcatcttagacctaaaagtctttgggaactacctcactagatcaggtagaagataatccagacctgaatgagggcagagattatattgataaagtaacagcatggattgatttgttatttggggattaaattaggcagggcacatagtagggcctccttggatgtttgatggctgttgaatgaacgtaagtgaatctgttcagttttagggttttattgcatttttgatatggattgtgccagtatatctgtaaagttcacttctatggctaccatgcatgacttgagtcagttctgggcttctagaggagaggttacaaactggtggccagtaggacaaactagcctaccactgttttatttggctttcatggtgtttggttctttttttcctttaatttcctgccagcatttcaaaatagatttcacataaaaaccagggttcctggcttctcttgaaaaagcagatgatctggcaaaactggacttatatttcctcatggcagcaactcagctgacactgactgcattagaccaagtccactgctgcctgtgtcactcacttttcctgtgagcatttgagcttgtgactctaagggcattgctttcaggaagctgttttctaaatcttaacgttacttttagtgatctttctacttatattgctatttaacacaccatgtggttatgtcacttacttaattagagtataaggtctgtaataccagtaagtatgtgttttctgtttctggatcttatccatggtgctggtatagggccttacacactgtagcaaggtgagtacatatatatctctacaccgatttttacagagtaattgaggaagcctatagtgccaaaacagtcaagacccttttatgctcttccaaagcatcttgacacattggtttggaaaagatagggaaaagattattatcatcttggagaaataatttgtgtttattcatggtaattcctgcctcttatctttactaatgttatcagttaatttcagtattgaaattacttggtaagttacttgcattgtgaagctgataagcaacattttggatttaactattttcttagccatattaattacctggattctttgaagttaggatttttggattttctttttgtttttttaaagacaggttctcactcttttgcccaggctggagcacagtggcacaatcatagcttactgcagcctcaaactcctggccttatgcaatcctcctgcctgagccttctgactacctgggactataggcatgtgccatggctgtaaaaataacaacaacaacaaaaagtcaaaagcaaaacaaacaaaaaaatctctaaaaaaatacttttttttttttttgagatgggggtcttactgtattgcccaggctggtctcaaactcctggcctcaagcagtccttccactttagcctcccaagtagctgggattacaggtgtaagccactgggcctggttctttgaagttaggttttataagtattttctcgtaggtaaaatgatttcagaaaataaatggaaagagctgaggttttactgcaatcttcattgtcaggaagcatatagaaaaatgaatttttagaaaagtgttatttgatgctctaagtgcagagattagtgaaaactgttgatggtaatattaggaatataggaaaaggctgtgttgtgtgcatgtgattgggttgtagagctcaattgaagtcattgaatcgatgactgtcaagttttttttttaaattattttatgaacacaaatctgtctttttagcctcacactagccagttaggtaatgattttgaattatctagtttgaacattgtaaacgttggtttcatgccaagaatatttaagccttattgtgttttcgtttgtacattaggtgcgaaattcatccacacttctctttagtgccttgatcacaagaatttttggagttaaaagggcaaaggatgaacattccaaaacaaataggtaagctccatttaaggctaactttactttttttaaaaaatacaatattgtcctggccaaaaacaaattttgaaattgtgcctactgttatagattcatctagagcataaaactataaaaatactgtaatgaattaacctatgctgccaagttataaacccttgggcaaaaatatcaactgtttaataagtggacctttcaaagcaacaaaaatttagcaaggtagcaaggggtgaaatgtagagcttgtttctccatgcaaaagctagtgttttttttgtttttttttttttaattgcatcttctttaagtagtcctgaaatgtcttaactttacttgtatatattatcctagcttgtataatatctttaattttataggtggaagtttaaatgtttatgatcctctcattagaacatctctcacattacctttgcattaaactctcgtactaagaggagcacctatatgtgttaaccacaagaaataaacagtgctttttacttttggtctttagttttatgtttaacctctaatttgtttttgtctttaaaaaacagcttttttgttatgcctgaaaagaaacctgtggaaccattttgattttgggtagtttttagataaaaatgcacaagatctgtttgtttttaaagaagaaaagctttgaatagttgttttttagcacttaagaggatttaatggtaatctaattgacttgcagttgttaacactagatgtcactgttgctgcacatttaattacttccttaactttatttaggatccagtttggcccagtggtctttctcttgaggatctagagttatattcaaagccctattcccttcttccctaaaaaagtcattatgcttcatatttaagttttaagctaatgtttattgaaatgcatttttgtgtgatggaactaaatcttaggaattaaaaaaatatgaaatcattttgtgatgtactagtgataattctaatgaaacctactatggtatttccgaattatcatttaaattgcttcttgtcaccctgtaacattcaccagatatttaaaaggaaggtaactggctgtaagtataaatcccttgagcatgttcaggcaataccagagagctttttaattttttttttaactgagtattttttaaataaataaaacattactcttgtggagggatgattataatttttattttttagcctgttcttaaagaaattcttcctgtcactaacttgaaatcactaatatttgtttctccttagctttgtctattttgttaataattctccagtgtgctacagtttaaaacagttgggtcatgttataaggccttgataaatactggtataaatgaaatatgatattaagtcatcaaacaagtaaaattaatgtttaaaactgaacttgaagaaaatttttttttgttttttatgaagtgattcttgaatatatatataaatatatatacattttactatgtataggagaaaatgatcagaaaatgagaaaacctcatttaggttgtatctgagggaggaagaatagggcagtgatactatacaattttaattttttgccaaagttacaatgatggaaacctccattataaatttattcctcttggataggaaagattacaaaatatataagatttctagaaaaaaggaaataggaatgagaagtttttaactgtgaagaatgtgagagcttttaattttagtaatctgaagatcggtatggaccattatgtgtacaaggcttctgttccctgtttaacccatgaagatatatttcttggcagctcccattaggtttgctttgcaaaacctttagtgtcttaaatttgcagttgcttgtgatggttcttttagttttagtttgtttaattatgtcactttttgtttaaatgtttatatgcctgttccttccaatattaactttctgaaggaaggacctttttcatctgttctgggtacgtaatgggcactttaagaaggctagtaataatgatatcttggttggttacttatccaccggataactaacctcagccggtgacacacctcacaagtcagttgtttcctttcacaaccacagattgtcctgctcgcaatttggaaatgtgtgttcttggtcagagggaactggacataaaaagaacatctgctttttccatctaatgggaaataaaggtctgacttggagtaaacaaacctggtttctaggcattttgctgccactggagatgaccttaataggcccccttatccactttgcacttcagtttctccatctatataccaggaataataagatctgtgctgtctactcctagggctattgtgaggataaaacaaactattagaagttcattttctttaacatattggaagtcctaggcaattagagatatagtttggtttttctttctgttaccacttctgtgattgtactcatctgattgtcttgctcttaagaccgtgctttttgaggacaaggtcagtatcttaaccattcttgggtacctagagtctagcatagtatctggcatatagaaggcatataggaataattgcctaatgaataagtaaattttgttactagaggagaaataagaaatctggtttctactcctgcgtttgttacaatataaccactataatcaactgagacaaaatagccaacctctctgggctttggttttcttctctgtaaaataaggtttggaatattcctgaggtcttttctttttttaaaatactaaagtaaggctttacataatgttactggaattgtaagtttggtaaaatgatgtattcccagtgccgtagaacagtccctgtcgcatagtacagacaagaagttcctgtttcatatataaagaaaggagcagaggatcctttgtaagtgtgtagagggtacctgtaatgactgaatttttgcacccattagtcttattttagatgtgttttttgggttttaaagaatgagaaaacagaagtttcacttgtgcttttaaagtaatattattacattttaacttttaaagctcttttcctttctgtttattgctgcgtgactgacttggcctgacagaatgaagaactgattttatgtaaaatcagaaccagcaaagctctgcaacctgtgcaatatgcatgttttctaaaatagcctccatctccatgtgagtgagctcagcttcatagctcctcatttcttacaggacaggagctaaactaatatggcgcttagctctaggtctttccttttagcccctgtgtgtattaactttcagctgtgagtcccagctaaatgatacatgtcaatatgtagcaatcagaaaaggtttatttttgacttcttggagtgtgctttgccaaagcttcatgcaggttcttaatgtatagcattgtctagcttttgcacactctccaccttaaatcagtgagccaatgagaatttgaaagcacttatcatgaactcagtattaacataataggggagtacatgaagaatataaaacttggatcttactcaaggagtttacagttcagttaggaagacaaaaattgttacatgtgagtcagatacaaataggagacaccatataaaaatcacctgtacaatgtgatgtgagtgatgaacacattagaaatttataaatggtagaattgagtggagtatatgttggggggaagtagtattttttacaaggcattgggaaatgagtagatttggggtacatggaaacaggtagattgaaagaggaacaaaataatagttttgtttactgtgttaagtacaatctctattctgtcttattaaagagagctcatattcaaattaatagcttaggataatttagtacaatttaagaagaaaatgtgtttctaaaatcatgggatgatccaagtaaaattgtttctagtgactatgttgggagatgttaaattgtatttattttattttccagggtataagtgatagagaattattttagttatttttcttagcattttagtggtgtaggtctggaaggatccttcaaggggcatctaatccagtccagcatcgtgcttatagagagattttgaagcaatttccagacagactggcttctctcctgttcttcatgttttctaggaaaagagattccacaagtttctgtggttacccacgctattgtttgggaaagaattgaattctcaaaactaaaattgaaagctgcagggcaattgggttttcatattttagagaatgtaattattagaattcagaatagcttatttgcttcgaactacatagtaacttgtagcaagccctatttggccaaattgaaaaacagaattttcttttgactgtggccggggtaatttttttttcttttttttttttttcccccccaagacagagtctcgcactgttgcctgggctggagttgaatggcaggatctcaactcactgcaacctctgcctcccgggttcacgcaattctcctgcctcagcctcccgagtagctgggattacaggtgcacactaccacacctggctaattttttgaaattttttttttttagtagaaatggggtttcactacattggccagattagtcttgaactcctgaccttgtgatcgcctgcctcagcctcccaaagtgctgggattataggcgtgagcggccagggtaatattaacatcctcaaacccaaacagttctaattttctccactgaacaagcatttattatgtttttactctgggccaggccctctgctagttactgggatccaaagataaatcagaaatactctctgccctaggggactccaagtctgatgaagaatatggcagttatctgtggtgctggagtctctgttcagttgtgtagaaggacaggagaagttgtgaaggaaggtaacatttctttagtgcgtgggccatgccagaccctttatacatgtctaacttagccgagatcacagctctgcgaggtaggcagtatcatcctcatttcacagaagagggacctaaggctcatgaggtttagctacttgcctgtggccatacagccagaaagtggcagaactagaacacaaagcgagctccatctgcagagcacatgctgttacacaccaaacaacggattccctcatgggcagggtgtcacctttttggagttggctttagattttattttgtcagactctttgggaaattagccacttcacccaaagtctgaatgttgaccaataatctcaaatctcccacatagtaggttgattttagcaggaaaggtaggagtaaaccagaggagaattttgttttgggttgactttaagattctttatctggacggtaaaagacaataaggatgtgtattttttggtgcatgaatgttatttacctcaatgagcccctcgctgttctcatgtagacagaggtgagggaggagaggagcaaggctcaaggtttctaatgtcaaccgggaatgtcgtaaaactatgaaggtagaaatcttagttttctggttagaaagtagagaatgaatgaaattaccccaataaggatatcagtgttgctagcaagaagttaactttttttttttttaacatttatctctataaaactcttatgtttgataatagtttggtgctattgatagaggattttgaggcttatgataattcttatgatttctctagacttaactctttctctagagtgtgtgcttatgtctttcattgatatctttaattaaaatgatactaataaccattattattatttgtttttatctttgagaggacctaggaagtcatccagtctcattctcattttgcagatctgaaaattgaggtgcagaaaagttaagcaatttgtgtaaggtcacagagctagtgctggtgatagaatttaatggttatttttagttcacaataagctcaactaaaacattttaaaaaatcagtcgattatttagaaatgaagtttctgttagcaacagtaatagtagtttggattcagatgattctgatttaaagtatgaagttaattttctcaaagaggtgctttaattatcataagattataaatattaatgatttgaaagtaagttaagagctctagtgttttggtatagtctggagtgtcattcatgcattttccagagttgtttgtagaattaacattcaatcatttatctactctttaggcagagtagataaatgagtatttttggagactgagaggtaaagtacaagttttgtgtaaccctggttgagatgttcctaaagtcagaattaagtctgtactgacactttggcctattagagagtttcatgtttcaagtttttgttcattcttaggttcatagattacaggtaggagaaccacaaataaagtttttaactgaaaagaagttcttcaaaagaaatgttttcatgaacttgaagtgggaattagtcattgtgttcttaaatattgactcttacgtggacgaagtaatctttatttctaagtactgcttcaggccattgccttctttaataactaaggcattgttgctttagtttgagcatgttctatggaattttggcaatgcatgtatcctctttctgcatcttagtaaaagcatgagtaaatattttttcttagctttggtatttttgtagcttacattttatatgggccagactaatataatgtaataccaggattacataatttaagacgtcaggattgcttccaggagtatgagataaagtcttcatttatcagggggtttacaagcagtatttcttgccccttcaatacctgtagagcaataccactgagctattttccaaatgagaaaatggagtctaagaggttaaagccagagggaacagtttctttagaacttggataatatttctttattcagaacttggtccttgtaactactgatttgagtaatgtacagtttggaaatctcaggaatttccagctattgttgttatacattgaacttttaaataaaatatactcttaattttttcattgaatactccttatggaccttggcatcctggtatatacaaaagtagtttataacatgtctgagatttcaaggagtttaccatttattgagaggtaagaccaacatggaaactagtttaggaaatgtgagaatcaaactctctggcactgactgtcaggggataagaggtcagaggaggatgaggccattctccatgtagcagtctgggttgaatccggacttgaaaggatggtcaggatttcaataggtagagaagagggtgttgcatatgggatcatgtaacataaacagagatgtagaagttggaacacacattgtacatgtctaagaaaattaaaagatgaatcagatgaggaaagagaggacatgtggaagtgttcattcagtcattcattcctagagcaaggattcatggtcacttagtctgcataggcactgtagtaggttctgagactatcagtgagtgtggaaaacagacatgtcaggagactagtttgaattttacagaacattgggattcatttagaagtctttgtatcagagtattctgtgataaaaccattgctttaggaattatttgagaagtgattgcattctgtaccactggctggtgggcatggagaatgtgatgcaaggccttgaaagggagtgccacttctaaattgagtagcagctatgttaatggggaatatatgtcctatgttttaacgaatactagttttctcaagaaattaagagatgtttagtgaaaaatagatttttctgttattcactgactagaaatgctgaattaaataatgacaggtttctcagacctgtgctataatgtgttttgagaatcatcaagagtgggatatagcatgcagtatgagcatttccctaaattatttgaccatggagattctctctcttcccttctctctctctctctctctctcaaagaacatatattgccattttttttccatccaacagtttggggaatactgctgtcgggatactgattaaagcaggtgaaaggcatatttctgattattaggagcagtagatatatctactgtgagaaagacatatatatttgagatatatcttggcagcaacagaaaggattagttttagttacagctaaatacactgtaaattatcccacattgtcagataaaaatgtaaaatagcgtcctacatatagtaggtagtcaatacatttgaatctaggaaaatttcataattgtagacctttaaaaattctataataaccaaaatgcctctttgagagaatgaactttatattctaggttagaatcttctaacattttgtcagaagaacataatttccattttcccaatgatttgaccattagtatggggaagatagtgcctataatacagttggtgaactgatcagcaagattagtacctaacttgcatgactgtgatatatgtatctgtttgtggggtgggtgaagagtgccgacagggagaacgacataacatagtaaccagctttgaaatacagtcttgctagtaaattaagtagcacactctgttgttgtcattcctaatccccacagtaatagcaccgtctgttaacatttacccagaggcttgaaataattcagacttatgcagctagaatccttttggctgcgaataacagtaaacccaaatcaaaatttaaatacagacaacttactatcccatatataaccaggaaattttaaagaggattgattcttttgaggttgaaaacatcatcagagactccgatttcccttcttgtttctgctgtgccatccttgatgtgatgccatgagccccaggcaagcttccttcatggttgcaagatggcttcagttccagccatcatatccagacactgcagtgtctaggcacaatacccagtggccttgtgcatttctgtttctttttaagagcaacagcatttcctcctgtttatgttcccatgttcccacctccacactctacacacttttcttcatatcttgttggccagagttaacatcttagcatggcccagcttatccctggtgatagaaatagatccactataattagactaataggattcatcagttgggtctggggttggtgctggtcctccccgaagcacgtgactactcagaagggtgaatacccaaccaaaatcagttctgttaagaggaaggatgagatagaggaataaatattgattaggcaactaatcatgtgtgctactacattcttctaggctatctgaaaagctctgaaaatgtttgtgttaagaacagtgacttaagactatgtatgtagtattttagcttaataggaaaatatgtttttcttttatgtattttctttatgtaattattaaaagatgtgaagtagtacaagtgtctagatatatgattccataaaattcattcctgtaagcagcttgcattataaaaatctcacccaggaacaaagtgtgtgtctttacacatgactttactaagttttgtagaacgttaaaatagagattctgagtagaatgtaatcagttcctaaccacgaaaatgctattctgcaatatgaaatgtctccctggttcagagctaatctctaacaagctaacagaatgttaacattgttttttaatataaactctaattcactttcgaatttcacctctatattatcacattgattttcttcttgtaaggccaaataatgtgaagtcaaatagtctttctagggtttttttttttttttttttttttaagacagggcctagctctgtcgcccaggctggagtgcagtggctggcacaaccttggctcactgcaacctctgcctgctgggctcaagccatcctcccgccgcctcaacctcccaagtagctggggctacacgtgcgtgacaccatgcctggctaatttttgtattctttgtagagaccgggtttcgccatttgcccaggctggtctcaaattcctgagctcaagtgatccacccacctcagcctcccaaagtgataggattacaggtgtgagccaccatgcccagccgtctttctaaatttgttgggattattaattatttttatttatgaaccaagtgttttgatgtaacttcttggtctctgaactcaacttaggtcagttgtcctgaacaatctctctttctctgtttgctacgtttctttcttttctgtcctctaaactctaaatgtttttttcagcatatactgcctctatagaagtggtccatgaggcggtctgggtcagggcagaccgctcaggcttagtagaagacggggtcagactaacttctcttgagaaagaaacaggttactaaatcttggagggctagaattttccactctataaacacaattctagaagcatctaatactcttcagacatcttcatctttcttttatttatctctatgatcactcaaattctgaatacctgaagttgatttagatacatataaatggtcaattgcatacttccctccttcaattcacttgatttcttcttttgccccctataagcaaagccttcttatgccgctggttccattttctatgattagtgtcctgtttagatgattcaacattttttttcttcatcattcattcagcacagacgtttgcaaggttcaaggatctgagtactaaggggagtacagacatttataaaatatggtcgaaatctttggggaagagtggaggaggagagataacacttgaactcggctgtaaacgtaactctaaaacaaagtggaaagctgtcagtactctgtgaactcctttcctctctctcaggggaagagcctgcatgttccactcctcccatttcctcacttcagcttcactgtgtaattgtacctggaacagagctctttctcacagtcttaaaacacacatcctctttaaacccccatctctttaattcttcttccattaaggtgagaaaatgtcatctatttctgtatctttcttccttcttttgctctatccatatgacactaagtgattcaggtcatggtttacaaacacagagcagtattgatgatatgcctctcctacctgtacagtcatgccccacataacatttcagtcaatgacagaccacatatatgacgatggttccataagattatagtggagctgaaaaattcctatcccctatgatgtctcagcacaatgtgttagtcgcatgtttgtggtgatgctggtgtaaaacctacctctgctgtgctgtcagttgtataaaagtcaagcatgggccgggcgcggtggctcacacccgtaatccctgtaatctgggaggccgaggcagatggatcacctgaggtcaggagtctgagaccagcctggccaacatggtgaaacctcgtctctactaaaaatacaaaaattagctgggtgtggtggcaggcgcctgtaatcccagctactcgggaggctgaggcaggagaatcgcttgagcccaggaggcagaggttgtggtgagccaagatcgcgccactgcactccagcctgggtgagagtgagactctgtctcaaaaaaaaaagcctaacatgtacgattatgtaccataatgtgatacttgacacaaaacgatgatgttactggtttatgtatttactataatatatcttttattgttattttagagtgtactcctacttattaaaaaaaaagttaactgtaaaactggctcgggcgggtccttcgggggtatccagaagagggtgtcgttctcataggagacaacagctccatgcttgttattgctcctgatgacctttcagtgcgacagaatgtagaggtgggatattgatgatcttgaccttgtgtaggcctaggctaatgttcatgttttctttttaacaaacaagtttaaaaagtaggataataaattttaaaaataggaaaagcttatagaataagtgtataaagaaaggaaatgtttttgtacagctgaataatgtgttttaacctttgttacaaaagatcaaaaagttaaaaattttaagtttataaagtaaaagttacagtaagctaagattaatttactatagaaggaaaaaattttttaaatcaatttagtgtagccttaggatacagtgtttataaagtctccagtagtgtacagcagtgttctaggccttcatgttcacccaccactcactctgactcaccccagaacaacttccagtcctgcaggctccattcgtggtaactgccctagacaggtgtgccatttttttttatctcttatagcatattttattctttttctatgcttagtatgtttagatacacatatacttactgtgttagtattgcctacagtatttagtacaataacatgttgtacaggtttgtagcataggagtaataggctataccatatagcctagctatgtaatgggttataccatgtagggttgtataagtatactctacgatgtttacactacaatgcaattgtctaatgacacacttctgagaacatatccctgttgttaagtgacaggtggctgtatttggaaatgaagttatatgtactaaaaacacattgtcactggcctttaagagtgacaagtgcccggttttccccagaaacctagcaccaggtcatcatctccatctctttcatgctttaattaagccaactttccgtttagcttcaaacacttcaaggaaataaaagaggttctttcaatgattctcttgttttgattagttatcaatattatagtagcataggtttcaatttttaattgttgcaaaagtgtagtgtttcaatggtgaagtaatttctgtgggctgtctgcagtgccaccatttatagcatttatgtctttggaaaaacgtatttcaattgccatatgactataagttgtgggctttccatctctggagatatcatacttaaatacttgcctgtttttaacctttctgttttcagccttggctaccttcaaaattgtgctgtcatgcactgccaaactggttggctgtcccatgaagatcaaattccatgacatccatggcattttttatggaggtttctttctctggaaacttttcttcccccaatccctgttaaatcgaagtttaacggtttttcagggccttgtgtataatatcactctttgtagaatttctttaatcaaaatagcaaaaggaaacatgtttcttggttcatttatcttagtcttgagtgggtttgtgtgcatgatctaatatcttcattatgtattaaggatcaactgtatgccagacttagtgcaggcattagcaacttattcttagggagcatacagtgtgctggaaatgaaacaaaacaaaaaccaacaggcacaaaatcattacagaacaggtaagtcttattgtgaagtgacaatagtgataaaaacgaagaagagggaacaatcattaattaggaaccaaatgttatagtattattctagtataactcaagtaagtgtttgattgttgttacatgttctgtctatgatgtatatgttttagcctatatattaggaaatgcttggagttgtgtttgctgtttacaagaggtttccctacttctcagagaaacttaccaattttagatatgtactctttatattactttattttgctttttgggacagagtcttgttttgtcacctaggctggagtgcagtagcacaatcataggtcactgcagtcttgacttcccaggctcaagtgatcctcccacctcagccccgccgccgagtaactgggactacagatgtgcaccaccctgcctagcgaatttttataattttttgtagagagagagtctcactacattgcccaggctggtctcaaagtcctgggctcaagtgatcctcctgcctcggtctcccaaagtgctgggattatagatgtgagccaccatgcccagccaggtgtgtattctttataatcagagatactctatgatataattgtcaatatttttattttggggggtgacagtaaatgagtatttagcaatattctctgttcccctgaaatttgtaatttttggtatatttacttaggagaaccacggacctttagagacctgagtccaagtgtgaattgaagaaaaacacctgtatgttttcagtaggcctatagactccaactcttttcctacatttattttttcttactacggtcagtcttttgtccctcaggtcctccccattatcactacccatcccatagatgagctctgtttccttatattcaaaacaaatattcttcaactgagattatctcttccttgctaccagttcactgctgattttacaggttagctaagtctagtgaaactgcggagtcttccaaagccaggtggatgaatggattatgctgtggtctaggctaggtcttgttgcctctatctgtttcacttttgttccctctttttatgttgaaagtagtatatgcttatttaaaataatggagaatatgaaaaagttagagtcttattcttgtcactcaaatacaatttttgttagcattttgttgcattttcctgtcattttctcattcgtgagtgttcagtttttataaggtatattactaattattatatacacacagttttgtatcctccctttttcgcttataggaggcatttttcatgtagttatgtaatcattcatcttctaagaggtgcttaagtaacattccttataatggacaaatcgtagtttacttgataattctactactattaaacatttcgtttcccccctagtttttaatattattagtaatggtatggtgagcatctttacgtataaaatgttttaatgtgtagggttatttcctacagatagattctcctaggtgtaatttatgtgtcaaaggttataactggcctcagactctatttacatattgtcagatttcttttcttttccttctttcttttttttttttttttttgagacaaggtctcaccgtgtcacccagagtgaagtgcagtggggcgatctcagcccactgctgcctcgacctcctgggttcaagcaattctcttgcctcagcccccaagtagttggggctacaggtgtgccaccccacctggctaatttttgtgttatttttagagatggggttttgtcatgttgcccatgctggcctcaaactcctgagctcaagtgatctgcctgcctcagccttccatagtgctaagattgcaggcatgagccacacccggcccttgtcggatttcttgaaaaacattttttcccatgtcaccttcctactcaggaatttttattagctttctgttgcctacagtctaaagtcatacccatctaattggtccttttcgtttttaaaacactttctaagaaactttttttgttttaaccacctacttatcattgagcattacattccatctgattttccacataataaaaagtgatgcagggaatattctcttatgcagagagaggcatgtttttttggattttttgaggggataaatgatcagcagcgaaaatgctgggttaaagaatataaacattcaatgaaactaataaccaagccttttaaaaaataagattatatcagtttacaaatttaccagttatgtatagtcttcctagtagtgagaataataattttttttaatgttcatttaagggaatgtgagggggaaatttccgtgtttttttcagtttgcattgtttttattactagtgagatttcaggtttgtccacattattttttggttaattgtattttcttcggcttagctttcaaggccctctgtaagttggacctgcccttttcaccttatctgctgttattcaaacccacaaatatttattaagcccctgctggctaacttctcccaccccaacaaataaacacactctaatcaagccaatctccctattgttcccttgaacttgtcgggcttttcctttttatgcttttgttcatgctttttctactcctacagtgcctgtccctcctcttttgcttacagtatgctgatttcccccatcctttgggttcaacccaaagcttttttcctcttggaaattttccctgacctgaccaacttgcttgaggacagggtccggggctcatactcccttgtatcccagtgccttatttaggatctgcctaatatagtaggtaggcaatgatgttgctttaaaaatgcatcttgagatagggagacctagacttaacttttggctctgactttgagcaatttattttagtcccccgggcctcagtttcttcatctcagggtcaatcataaaatggggatggtaatagtatctgcttctagagttgtgaggaataaatgtggtaatggtcatcccagcacttggtcttcctttccttaggacccttcctgatgtgccccagattctgtatgccatctctttcttgcggtggtattgtttcttgtgaattgttatatgccctcagataccaaattcttaagttggtgggggattgtattttaaattttttgcccatcctaaagcgctgtgtaaatgctgattgagtataattgagtagctttggtagcagtgagtataattgggtagctttggtagcagtgaaaatgagggcaatgcagtgaggaggacctcattttcagtcttttactaaaagctttactgaccctttattggagaactttctcttagggcctttaaaaaatatttaattttgttgcttattcagccaaatggagttagttatttagtagaaaatggtaaaaagatccaaataacaccaccggatttcacttttcccatatagtgtttcaaagcgttgtattcattaatatttgtgcaaaaacctatggttaataccacaagnnnnnnnnnnnnnnnnnnnnttaacaacagcgttactccctaatttacaccaagcattctcaaaaagctgaaacaatgaattcatgtttagtcaccgtgtgactggctattttcatttatttaaaatataaacaacaaaaaatatcctggataaagatctcccacatattttaactagtgacagatgctatgatcagtatttttacttaagtcaggcattttttacttacacctcaagccttgcaattaagctttagacctttccaagcataacagttaaccaataaaccaaaatatcagcctggtctggcttagctcagcggtcttttgatttcttccagtctgtttgatgtggaggcttattgagatttatctactgagctgttcatagtttgtagggctgagagcactggctatattatataagattccattagtgacagaagagtgtagacagtctctacagtgtagatcgtttagtcagttgtggtagtcataattttgttgaaatttttaagactgttgtcaagctttttaaaattaatagtcaattatttttcttatttaccagtttatactgtgagcctcaaaacagatgtagtttgattggttcaatttagtagaaattttctcaactttcaggagaagtctctgcagatgtgaaaacttttccaattatttggaccagtttacccacagggaaataaaaatagaaatacagagtaatcagtcctaaatatttgctgtgtgggtaggtaaacattattccattgtattgttcatgatggtagtagcatcagtataccaaccttaagtgctacaaagggcttttacatactatgtcctgtattcctggtagtgatactcagtaagtattattgtcccttttctaaatggcacacttggaatttgggttatttatttgctacatcatttcatatctagcgtgaagcagagctagtgttcaaatttgcactacatgaaaggttttttttcttgttaaataatatacagtatttcttaaagtaacaaagttttgccaagcagcatccccgtggtggttttttttttttttttttttttttgagacggagtctcgctctgtcgcccaggctggagtgcagtggcgcgatctcggctcactgcaagctccgcctcccgggttcacgccattctcctgcctcagcctcccgagtagctgggactacaggcgcccgctaccacgcctggctaattttttgtatttttagtagagacggggtttcaccgtgttagccaggatggtctcgatctcctgacctcgtgatccgcccgcctcggcctcccaaagtgctgggattacaggcgtgagccaccgtgcccggccccccgtggtgtttaatcacatcctctttctttagaagtagaataaaattactcacatttatcctgctgaagataagaaaataaggtcatattggaggaataatgaaacatatttatgctttctgcctcagttgcctcatgtcttgaatggggaaaatatctcttagggtttttgtgcaattgagtgagttcatacgtgcctgcagattaggagagtacttggcacagagtaaatgcacaatacaattagctcttgtaagcattcatttactcagtagggtatattgacctgctgctatgtgccaggtaatatgctgggcattaggaggtaaataagtcaaagtctttgcccacaaagatctcagaatcaagtagagtagacataccccaaactgtgtgctagcagcgtgaatattctcatatagaggtatgcaaggaggtatggacacacagagtagggatgagtagggactgttaggcaaaacttcctgtaagagtcagggcctgagcttgaaggatgagtagaagttaaccaagtgaagaaaactgtaggggcaaagggagccaggaggacagatgatggtagtgaaaggttggtgtgaacatgttttttcaattcagaatttcttgaagacattaatatgctgctatgcattatgattctccagtcgtagcattgactactcatttaaaatattgaatcatggaatccttttaatagaatatccattgaagagctgtgttttataggacacactttgggaaattctggatggaccaagtggtgagaagagaggagcatgagttcaggttggaaatgaggcagacaaggaggatggagagacagatactgattagagatattaagacagtagatttgataggacttgatgaaaaacaagggggccagggaagaggaaacatagtggcatggcagcagatttgtggcttggacagattctggggctcatggtgccatttacagcagcgaggatttaggaggaggaacagactggtgggggaagataccaagttcagttttgcccctgtgttttgagatgcctgggggacatccaatggcagatccaaaatgacatctatttggcagttagatatgtagggtctggagcataggagtgaggtctaggtcagatgaaggagtcatccgtaggtggtattttatgccaggaaagtgaatgagatcacccagaggggctagggtagactcagggaagcatcagtatttaagtgaggtatgaaggatgaggatccctcagcagacattgagtattttagtaatctgatattctttgggacaggcttgctcttttcaagatctgtgagtattttgttgtgttgtgtttttctggaaagtgtctgaatccacccatgcagaaaatctactttgtgggctcttcctcccaagaatctgggtagttgtagaaggaggcacttaacccacgctctgagctctctaaggagagctgtgtgagactctacccagcccttctgaactcagtcagagaaggtggagccatcttgcatcgttaagttttggagtgttaagtccttaaatgtaactggagaaataatgaaagggaagtattccactggattaaacaagttcaatggattttaattttcctgataaactattattaagaaattgttttggagatttactctttgagtaggattagctaacctccattttcatttggataaatagttctttaattagaaaccaagatttagagaatagttcctattgctttacatagtgtagagaaggtatgtgaaactgccaaatcaaggttttcctcatgatagtgagaagcagggaaaacaagaggaaattataatatgttaagggaaaagattcttttcatccaaatataccagcttttatcttcaattctgggtctttgccggcagggttttttccccctgttcttgtcatgccaacagttgcatatttctggcaaaatgttcgttactggctaggggtgctcaagaaatcttttgctagagaattaagcaagcagaagtctgtcaaaacaaatattctagtttgaaaatacagtcctgcgggggaagcaggaggagtggatagtggaggaggccagggcgtgttctgaggctgagtatttatttcataagaattctgtgttctgaaagactgttgtttgtaggaatgccggaggaagcgggattgtggtacattaaatgtactgatgagcaagatttttctggggaattttggtttgttcttgtgcttgttatgtagctcatgtgatgacagcctttgccgagagtgatacattttgctaacaaatagccttcttaacttaattcaagaggcatttaacaaaacttattagtttacatggaaaaaaacccaggcccaaggatactaaacacacataaacaaagatgcacataaataccagtccacttcataagcatttatttggctaggaatgccaacattatacaattccaatcttgaaagtattcattgattgattcaaaaaagtaaaacttgtttttccttctacttcttttttgttacttttttttttaagttacttgttttatagatgagtaagagtattaatggatagaagcaaaagttttagattcctttgttatatagttgctcaaagctactattatagaagttgctcttcaagttggagaaacataggctgacatttttggttttacccactgggatgggagtaggtgctaaccatattaagcctcacggatgaaaactgttgcatacaaaagtggatttatttcttctacagaattttctgaccatatatcaatatacaactgagattttgtgagataactataaataaaatatactaccttataatattgttgtaaatgatcttacatagtagaatgtattagtaataaagctctcaaaataactaataaaatagagatcagtttattcttagcttcttccggcaaattttaaacttgctactgtaagcaattcaaggagcacatgcctgtgtctggagcactgagaggaaaccatcctgctctttccttccctgatttcatatactttagttattggaagaaagattaattaatgtaaaatttctttacttttagtaattcaaaagaataaaaattttttgagggcttgaaaagatcgtggtgcaccattggcaccattggaatttgcctttagtaaatgtaacatttgttttctaaagaattataacaacatacttaaattccagaacagtaagcaaaatagcttaagttcactgacttgaaaaaacattcttttatactgcacgattctaaaataaatacttaaaagaaacagagagcaagccattctatcttggatttcattttccttcagatagaacagctagaacaaacattcttgctagttaacattgcctgtgtttttatgaagttaataactgacctgtcaatcacgccctatataaatacggtagttgaatgctttctgctttagaagcacttttatttacaagagctgccagccaagatttccaaaggactccacgggctgtttgctttgatctgttttgagggctggtctctttatacctgttggtttgctctttctgatacctttgtgtaatcaggtatggggagagcagatgtgcagaataaacacatcttaagggaaccaagtctcaagagaaatcaagtaattatgaatgaacagctctaaaaaagagagagagaatattttcttaaatcaacttagttgctgttatgaccaaagaacagatgttgtggtgttcaccccagagaagcaagagattttcccttaaacctcagcttataatgaatggaagtggtatgtgtatccctcaccctcaaactgttgctgtcctttaaatttgtaaattgctgagatgttgcagctcttctcagttgacttttgcctttgaccttttctcatttgcttcttccctaggaaatgttaaccacatgtctctgcccaaataattgagtctctgtgagagtgtttacctttatattttgaactggaaatgccttttagtatttaagacaattttccaaaaaagatggctttttgttttgtgattttgatttggagttctccctcaacactgagggagaacggaaagccaaattcatctttgtatccccgcaaatggcaaccatagggcacagtgtataagagaatgatagaaatgaagagaaaccaaaattctttggtcttccttccaaaatggcctattctgagtttagtttatttcacttttcaattaaatgttgccctaatcatttccatatattacatttaaatatcacttttctctaggaatctgaatgtttgaacatattagaggttgttaccttctattttagtttgaaattgaaacatcaaaccaaaaggtagcctcccctgtttttttaaactagaaatgtttaccttgactttacagtcctttaggagagcctgatttagagattttcaggcactagaagttcaccttactatttcaggaaattctctttatacttttcaaatggctttcatggacattttttggtcagcgccttccccttttgtgacactggcaggaatcttagagtttctgtggaaagatgcctgaacgttacccatggtttggaaagcaggtgttttattaaccagagttttctcctttgttgctctaacattttcaaaatctagtatcttaaaatgttatttggttccttatttatggttttaaaattctggcatctctatagtaatcaacaaagtataaaatgcagcccgaaatccccttgattcagcagccttcctcagatactcacttgccagagtaaaattatttggtaaatgttaaggtagattaaagcttgggtttaaactctgttccctctgggcaccttttgggggtcagaggtggtaaagctgtggtattgcctggagccagtgcaaactaacaccgttgtgttgcctgtgtgaaggcagaaacctctaagggatgtgaaactgccaaaattacatttgaacattttcaggcctttgattgcagaacctttgctgaaagcagtagtgcagggtagccagagatcaggccagagaagcaaggaggagtaaacttggatcggccatgccacagatactaggggagaaactgcctctccaaacgatgcacaagggacaactctgaaggtccatgggactgctgagttagcagattagctgagtcccctccagtattttcattttgcattcatccagggctcaaacctataattaaattttctgaacaaagactctattaacccagaccatccagattgatgactaacagctcttccttccaggtacataaggaaatctgtaatgcttaaagcaaaataaagaccctagtcaggtttgggggagggcaaagtcagggagtggatgtagttaggactgggtttacctttcaaaaatcattttttagtacttaaaatggacctttcaatggttcctgcacttactcaagtatatgtgatttactgaatgatctaaaacttagtcacagggattttaatttagatatctatgaaaatgtgttggtttttaaacttttggcacattgtttaaaaattctctctttaatattttgtgtgggcagtgtagacttaggtgaaacttttcagcacagacccagacacagttcattatgttactcctatgccaaaacttcaagtagctttccagtgtttgagaaataaggttcaaattcattagcttggcatttgaggccttccacagtccagcctactttctacgagaggtttttgctctagccttggctgttgtccccagcaaaccttatacacctctgcctcaacagtgtccttgtgccatccccttctccactgacttttctcctcctcctacagcctccccacactcctgggacaggtgaatcctaactgttctgcaatgccaagcttcacctagtaatactttaggacctctgcttttccaaatctgtcaacatcctggttaatcccacctcttgtgaaactggctttcctggagcattcctctgtgggctctcccccaccagtttggcctccagagcaatgttataccacgtctatggctcttaccacgccaacccttcatttgtggttggtttttgtgtttttgttttcccattcatttctgtcttgttttgtaaacttgataaagttccttgaggcttagaattgtatcttttatgtacgagtgtcctccagagcacttaacataatgtttaatatatatctgtcagttgtttgattgattggtgcatgtctcaggcccagggcttgatgtctttgcagtctctaaagacagcgagctattttcagaaccactgagtacctttgtaccaggtttattttttggcttttcaacttggtagtggagatgttaggcccagttctgtccagaaaatgtattttccaaatctttgcatggacagaatagtgttacagtcacagtctggagcagtttcacctgggtactgccaactctttcttatgctgactggctgacccatgtggaagtgttcctcagatctcatttcagctttctggcttaccttttttttttttttttttttttttttttattaagagaaagcttgtttctaagatccttttgggagcaaaggcaagtaagtattcattaaatgtttactttcttgactttaattcacttcaccaaatgataactcaggggggattatgccttgacagtgatctgacaaggtccttgttcagggtagttactgacttttccagtatcaaccttttaaatacagcatgaagccaacatccttgtgtctgaactatataaggaactggctttcttttaattttatgtgttttgagtttgaggaagatgcatattttgccaagatgtggcttttgagacttccgtgctgaactcatttggtctgaaaactactgataaaatttctacttttgcaaacttgtttttttgtttttgtttttaaaaagtaggcaaactcagttttttaaaaaacaagtctacagtagtgaatgccctaactgacacagcatgctttggcttctggaagcttgggccagactctgagagattttaatagccagtatggacctatgtacacagtagtcagtccctcacattcacacagcactgtttaacatgtgtgtatttattcattcaacaaatattttttgagaaccagccaggacccaggcattgtactaggttcatgagatacagggatgagtaatcactggatattttacttccttattattattttgacttttagtttctagtctgttttctcttactagaatatcagctctttggagggtgggtatttgcctcattcagtgttttatcttcaacacctagagcagtgcctgacatagcagaagctcagtaagtattaatcaaatgtatgaaagaaggtctacaacaagggatgtaaacacttataaaagcacatgggaaatgcatataatctgggattgggggagtcaaggaagacatcctagagcaagaaagataatgggtgagaggaaggatgtgcaatatttatttgggaaagaggagtggaggtgagggtgactgctcccgtgcaaaagtcaggatgaaaatgcacagggtacagagagggcagcctgaagtgagctggggaccttgtcagctaactcaaggacatgggagcaaagaaagtatcttaaacacaggtataacaggatttgctttagtatgatcattttggctgatgtggctggattggaaagttgtgctcaagactgagagatctgtttgtttgaataattttgtttgttagaataatgtagacaagacaagtggtacctagacttttctgttttgtgaaccagcaaaattttttttttattttgaagatcaacataatacagttatcaaccctttaattttgttaaataagtacattaaaaagcatattacatgtcagaatcatttcataaattaaaggacattttcacatacataaccacatatatacatccccctttaggaatctcaaattaatattagatatttaaatagaataccttagctttatgcagaatttacggcattgcactgtggggttttttgttgttgttttggttgttttcattttcttcatgaatgggcactggcatgtggtctgatatttgtaaaccggagatgtaggctaggatgaaaatgttggtgatcagaattaggatagtgacagtaggggttgaaaaaagtgaatagaattgagagataggcggtcgaatcagcagaacttggtgatttcaaagtacttgcagatctcttatctcatttgatcctaatggtaaccatgtgaggaagttaatttggttaggtatagttatccccatttaatagatgaggaaactgaggctcagaagttaggtgacttccccaagttacatatctgatgaatagcacaatgaaatcatcattcaggtggcattggactcttggtatatggcaccttcacccctttttgcttttgctcacatttcagggaagaaaggaaaaggaatcctgggctccctgtgagtcatatcttttaggtcaaaacatacgacgcagactgtccttagaataaaataatattttagtgatgactctttgatttatcttatcttgcaacatcatccattaccaatccatgaacttgagtaaccctatttaaattaggccagaggagatgaaggcttctttggcagtattttcatgttatcctgtgctaccctttttcctttccataaataagccttggccattctatttatggttgtgtttgttttgttttgttttgttttttgtcgagaggtagaggacagtgagactgtgtgtgtatgtaaggatatcccctatcacctgggattttttttttcctttctcatcctcagtgtatgtgcagattagtttggtgctatgtagattccagaaagaatggaatagactttataatggagtactccttgttgaagggcaaagacaggaagtggaagtgaataaaaagaatgaaattggacttaaaggagaaaaaagtgaagcaaaaacaatttgaattggacaaaagaaaaaagtgttagaaaatatttgtgggcggttccctataactgaattttaaataacatttttggtgtatagtcataaaatcctctgacctatgaaacaccagtttaatggaattaattaaaaataagatggaatgccagaatttacatatgaaaactatcagtaactgttccttcaattcattgtttttatttagtctttgtatcagtcatttttctaggctccttgtttcctggcaaatttgaaggtgtttttggaaaactgttaagattgactttaaattattttagtagagactcaactactagtaagtctgttgtaattacaaataattatgagaaatacggtttccttttccaagaagcaaataaacttgttattgaagcatctgcacctctttgtgtatatgttcacagaagtgtctacttttactactagaatgggcacatcaaaaccaaatattggtatcttattatgtgtgagtaggagagtgagagtagcattgtgtataccgccattttcatctcctttaatcacctcactcactgtgcatgtgtgtgtgtgtgtgtgtgtgtgtgtgtgtgtgtgtgtgtgtgtgtagatatcctaaatacgttttttctaccgatgtggaacattctatcccacttcatagctgtcttcctggcctttggcacgtgtgtgcacacacacacacgtatataaaatttagtgtttgattccttcaaagtataggtgttaatgtattcagaatgctgtgtaaaattttttatgccagacctaaattttattcatgctttcaatgcctgtactttgtgtatttttaaaagctatttgcattgtaagtttgaaagtgagttatgttctctggtgtactcttagtatcttagtatcttgagtgtgttgaacttaattgtaatttatactaatttcctctctattcctttcatctcatctttaaagtgctgagggaaaggaagaggacttggtggcaagagccaagacaaaagaacaatgtgtgtgtaatttgttcagaaggtacaaagttagatttgtgatttgttgatgcattatctcatttctcaagtaattccactaagtaggcactattattcccattttatagaaaacaaaatgtagtgacagagcgagactctgcttaaaaaaaaaaagaaaagaaaagaaaatgtaaaattatttagcaaggttgaatgaatcacccaaggttacactgccactgtgtggtattcctctggtcaggctggttctagacctttgctctttctctactttgcatttcctcattcccaccccaccacagaataaataatctgtggaacatggtttcacattctattccatgatgtagtagcagccttttctaaaatgaaatgctgtgcatattattattttttaattgccattggaagtaggctgaatgtagtcagataaatagtatttgaactgccttagtttatgtggaatattacctttgtctgaatgcatgactttttttaaacttttaatgtgattttataatttagatgagtatttgccttaacaatgatgagttttgcacatttttaagactacttggaggtatttatatacctcaaatatttactaggaagtatctttgcaaggttaggtaaaacattttaccaaatgagtttcaatgagtctctgttgggaaaggttaaatagcactgtagcgtagtcttttggcaatcgagcagttcgtctgcacaaataacagtgaatataattgatggtcttagtaataaggtcataaagtcaaaaagagctaccacagtgtggtcaacgttttgaccataaggaacagaatgtaaaagttggttagctggaaggatttcctgcctccttagtaactattgtgtctctgtttccttagtcatagctgaattgagaagaagagaaaaatcttttaattctgcatttagaattgatgtttttcagatttacatagtggaaagcgtgtttggatgagtataagccagaacctaacctatcctttgcataaatgcctttctgcaatactgcttattcaggataggcttctcttgtgtcttcttgttagcctgctctctaacccttgttttacacattatagcatttaatatgctcctgtttttaactgacagaattactctttgcattgttgtgtgtgtttgtgtgtgtgtgtgtgtgtgagagagagagagagagcgagagcacgtgcttatgcaagagagaaagtgtgtttgtatgacggacagaagtactacaggcataccaagaaacagctgccacctaaaatttataatcaacaatagaaagaaaaatagagattttttaaaaacgggaattccgtagaagcaggtatactgtaatatagggaacagatggaaaaaaagtaagttacactctcagggaggtgagatgaaattaagagcaatctgtgaataagaaggagctttagaaaattaaaaaatatgatagcccaagtaaaaatttcagtacatactagggaagacagtaaaaggacactgccagagattgacctagagagagggagatggaacatgggagagaaaaaataagattagaggattatcaggcagttgaacattcaacttacagaagttcagaaaggagagcagagcaaagtgagggcagaaaattatcaagtagcttaagaacatgtagaactaaagaacatgagtcctagtacagtgaatgaaaaatgattcaccccaagactcgtcatttccaaaattttgtgaagtgagagaaaaaaaaaacagctcatatacagagaattaggaatcaaaatgacagtggacttagaagttaatggagcattgccttcaaaattctgagggcatatgatttgcttcttattcgtatttaacttaactgttaatcacacttggagctaaaatagagtgtacttttattttaaaagttttcttttaaattaaggacaaggaaaatatctttctctttctttccaggacatacatgaatacagcacctaagtattttttaaaagttagttgccaaacaatattgtttaacataaccatgtatgtgtaatttagtgtgtgtgtgtgtgtgtgtgtgtgtttagacagggtctccttctgtcactgaagctggggtgcagtgttgtgatcttggctcactgcagcctcgacctcttgggctcaagagatgttcccacctcagccatccaagtagctgggactacaggctcacaccaacacacctggctgatttttgtatttttttgtagagatgggttttcaccatgttgcccaggctggtcttgaactcttggactcaagcaattctcccacctcagcctcccaaagtgttgggattacaggcatgagccactgaacctggctaatttaatgtttttatatgtgcatagaaaaggtctagaatggacaaagtggaatttctccttctacttacttatttgtatattgcttgtttgttttaatgagtgcatattaattgcaattaatagaatataactaaagggaagaaaagagacttgatttatttcttcatttatttaaaagaaaaaagttggcaggccaaggcaggaggattgtttgaggccagaagtttgagaccagtttgggcaatatagcgagaccctgtctctataataattagccaagcatggtagtgcatgcctgtagtcctagctacttggaaggttgagccagaaggatcacttgagcccggtgagccatgactgctttactgcactccagcctgggtgacagagcaagacactgtctcttaaaaacaaaatgtagaaagtgcatgctatgttgttctcctctgctgggtgctataagaaatatagttgaagtagcaaacacagcttcagtctttaaacgattttgggtctggctattaagcggaaacacatatgtaagggaatgactcccagctatgttgaaagtctgactctgtgtaatttcaatgtacaggctgctcttggggccaagcaaattcctttccagggtctgcaagaggtggcagtctactaacttcagagtactttaaaaaaccagcgtttgtgagaaaaccaaaaacaggactctcatcttggaatatctaacttaataaatttcatttgcatgtatacagaaaccaacctacttactgctgccagccccaggagccagaggttagagtttttaataataatagcaataatgagttatacttattccagattagttttctagctctcaaaaaaacaaatggctaagatgtccaaaatgttcttttcacaactctaccaaatgctggctttccctctccgtctggaaatccagccaatctgttgaaaattatcctattatttgagtacttccaggcagttcttcagaaggaagactaattcctgcagtctgagatggatgtccacttcttaagggactcttttccatacttctgcagctgaggaaaatcacaccttgtatcctgagtcttatttcttctaattgtgaatttgggaaaatatgtgtataccagacatcacatcatacctatagacagcattgtgtcttaattgggagtgtaacatttgcctggtgactacttgggttttttgtttgtttgtttatttttcttgtaaataagtctcagcctgagtgttcacagacttacaaaaagcatcggttcactggggaaaagtgaagcatttagcctgaataagaacaaatacacacactcttttctggtttgatttgcacgggagttagatgtttttttgggggtgggtggagggtagtaagggatattctagtatattaggaagagtctcttaatttgaatacaggagagacaggagacttattggacccaatggaattatctgtggtccagtgatctccaaaaatgctttgtaacagcagatgattagattttaaaagatcagtttagctggcagtttgcctgttcatctactcccataaattcagtgggtgggcctgactcagtgtgtcggagtagaagctcaggtgaggaaccttaatctaacctgaccaggctgattgacagcagtggagagactgccatacaaccaaaccatggggacacatgaacttctttggaaactggcctgtctgggtcacagtgtgtcctctgcttgttaagaagatgcctggcacagcagtagttagattacttgtaaaatagaaaccttggaatgtctaatgactagattgggaaataagataattggattctagttctgtatttacctccaagctgtattttgatgttgggagactcacttcatttccttgggtatcagttttctcatctgtaaaaggaaatgagtacagtcatttgaaaatacttctagttttattatgttccttgaaatatgggactattggcaccaccccctcacttgaacaatatgagttggcatattaatattaatcttagttaaaagtgttagctgaacaaaatgatagaaacaaaaaaaaattatttgagaatattggaccttatgctaaattagtctattcacttttaatgaatgaaagaggaattgttgggcaatttcttttttctttctttctttctgagatggagtctcgctctgtcaccaaggctggagtgcagtggtgctatctcagctcactgcaacctctacctcctgggttcaagtggttctcctgcctcagcctcccgagtagctgggactacaggtatgcgccatcacgcccggctaatttttgtatttttagtagagacagggtttcaccacgttggccaggcgggtcttgaacccctgacctcaggtgattgacctgcctcagcctcccgaagtgctgggattacaggcgtgagccactgagcccagcctgtgatttcttgatagtatagtagatgagacaaatgtagtactgtttgaactgttggcatgtttagtacacattcctgactaaggttatgtgatgctctttagaattaacaaagaagagtttctgtaatcttgtatatatctttagagtcaggttgattaacatggaacccctatggctgaaaaagaaggggcaggatttgtgggaagttctaaaaaaaatagcaagaagatagcaaatatttactaatgcctcctatgtactagacaccattctgggtgctgggatcagagcagaaattagatagtctttagtctcagggagctaacatcctagtgagaggagatggactttaaacatgtttcagtaaaacaacagtaactgttaatgttatgaaaaagtaaaattggtattgtagggaataatggacagtgggggatggaatgtgcttctgtaggttggaaagatagggataataggaaatgaggaaataaggagtgtggatagctgttcagagtttcactttagagtttctaaagccatcaagctctaaactttgcctctggagctcgtggtggcagttcaggatctgtgcttgcctaaggataagagagaggccaaactgttgatcacttgcctcaatcctgcttcaaccagaacagctctggtttctttgttttaatttaatagcatattttttattgtggtaaaatacacataacataaaatttaccatcttaaccatttttaagtatatggttcaatgatattaactatatttatattcttgtgtaaccattaccaccatttatgttcagaattccttttattttgcaaaactgaaactctatactccttaataactcttcattccccttttcctccagtgccccagtaaccaccattctactttctgtctctatgaatttgactgttctagctacctcatagaaaggaaatcatacagtgtttgtcttttgtgactggcttatttatagccacccctgctgtcttccgttactatttatatggaatatattttcccatgattttacttttaatctatttgtgtccctagagctaaagcaagtctcttgtaaacagcatatagttggatcatgtttttttttatccattctgccaatctcttgtcttgtggttggtgagtttaatcctttacatttaaagtagttactaatgagagacttacttgtgtaatttggctatttgttttctatatgccttatagcttttttttaatgtttagtttattttttgctgtgaaatgttttaatttcctcatcatttcctttgtgtgtttgtgtatattctataactattttctttgtggctgccatgggtttcaatttaatattctaaggttgtaacattctaatttgaatttataccaccttaacttcagtagtatacaaaaactctgctcctatatggcttcgtctctaccccctttcagttaccgatgtcacagatttatatctttatacagttgtgtccaaaacattagtagttgttttatttttgtgcataaatctcttaatttatgtagaaaacaaagtatgaagttataataatactggtttttaatctaataatagtttttaaaaatatgctagtctcttaaatttttgtagattacaaaaagtggagttataaaccagagttacaatgatcctagcttttgtaactccccatgtatttccctttactgagatctttatttttcatgtgacttcaagttcctgtccagtgtccttttatttcagctttcaggactctttttatatttcttgcagggcaagtctagtggtactgaactcacttagtttttatttatctgggaatgtcttattttctccctcacagttgaaggaccgtttgccaggtattggattcttggttaacaggtttttttgtttgtttctttcagcactttgaatatatcagcccactgccttctagcctccaaagtttataagaaattggctgataatcttattcaggaccgtttgcatgtaacaagtcactttttcttttttaagacggggtcttgccctgtcacccagcttggagtgcagtggtgcaatcacagcccactgcagctttgacctcctgggttcaagtgattctcccacctcagcttcccaagtagctgggaacacaggagcacaccaccatgactggctaattttaaaaattctttgtagagatggggtctcaccatgttgcccgggcttctctttctgctttcaagcttatctctttgtctttgtcttttgacagtttgattttaatgtgtgtgggtcttttttagtttatcctatctggagtttattgagcttcttggatgtttatattcctgtctttcatcaaacttgggaagttttggtcattatttctttagataatctctttacctctttctctctctctcttctccttctagaactcccataatgtttgttcacctgatggtgttccacaggtcccttggacttattcacatttctttaatcttttttttgttcctcagactcaataatttcccttgtcttatcttcaggttcattgattatttcctttacctactcagatatgccttcgaatccctctaatgaattttttacttcagttcttgtacattttagtggtaggtatttttatgtttctttttaggtttctatctatttattaatattttcattttgttcatgtatcattttcttgactttctccatgtcttcttttagttttttgaacagcttcaagatacttgttttaaagcctttgtctctaccatcaagtctttctcagggccagttcctgttgggttccccgccccccctttgaattggctatctttccctgtttctttgtatgcctagcagggttttgtttgtttgttttgttgttgttgttggaaacaggatgcttgaatctaatagtgtagtaactctggaaatcaggttctccctctttctcagggtttgctgatttctgattttacttttgttgtttgattgtggtaggctttgtctgtgtcagggggtctgcctgatgtgtaagcttaagtttttctcaggtcttttttgagcctgcacctttcattgggtgtgtgtggtaaccttctacattcccctgatatgtggttacttttgaatgtcctagactttaaatatctgtcttctgaaagtgggaaaagagaaaaatgaagaagaaaataaaagcaaaaaaaaaaaaaaaaaaagaaaggaagaaaagtgaattgccctttaaattccttgcaagttgcttcagcctgaggggaggggtttgtaactgtgctaagagggttgcaacaatggctgcctgcctatgtgtttgtatctccaagatcagaacagcaaccattgatcaaagcacagatccccagatttttggaggacgggatcctcatcccacaggctttgtgtaagctgatcctggagcatgtgcatagttgcccgccatgaggctagggattggttagctgctacagttctaggagctgaaactgaccaaaattgactgcaatttactgtccaatccttcagatagactacagaatttcaaaatagttacactagacccattctgccagtgcagttgttgccttcgtgagaacacaggttcctagtgcttcctacttagtcatctttcgagaattctttcactggttttgttttgtttcgatgctttattaataaaaattggcattatatttgaaataagtaatccattgctttaaagatttggaaaaacaattgccttggaaaaactagttatgtttattctttcccccttagtgctgtcaaaaatcggataacatagagacaaatctctaagcagaaagttttatttaggaatatatatatataaaaacagaattgtaaattgggatatatgcaaagaccagagtggtttttggtatgtccaaagtacaaaggaaatgttgggattttactgggaaagagaaatattacataaaatgttttgaaacaaagttcattaaattacaggtcgtttcagcagctactaggtaaaactagtcttaaggctatgggaggttatttcagcagctgggcttgtgagacagttcctggagctggcactttgtgtcctgagtgctttttccctgggttccttgactctgatttgcttggatatgacaggaataactccaattcctataatcagtttttgcagtgccttaactcttgtgttttagcatttgtgacaggcagattaatggcccttcaaagatctcagatcctaattcccagaatctataaatgctatcttgtaagggaaaggggatctttgtagatgtgattaagaatcttgagttggggtgatgattatcttggcttagctgggtgggccctaatgaaattgcctatacaaaggaggcagagggagatttgggagacagaagaaaagagtatgaccacagtgacagagattggagtaatatagatatggtttgatatggtttggcttgatatgatttggctgtgaccccatccaaatctcatcttgaattgtagttcccttaatccccatgcatcgtaggacggaactggtgggaggtaattgaatcatggggggtgatggttttataaggggcttttctccctttgcttggctcttattctctctcctgctgccctgtgaagaggtgtcttccaccatgattgtaaatttcctgaggcctccccagccatgcagaactgtgagtcaattaaacctcttttctttacaaattattcagtctcgggtatttcttcatagcagcatgaaaacggactaatacgcagctataagccaagaaatactgacagccaccagcaggtggaagagatcaagatgggattctgctgtagagtctctagaggtaccttgctgacactttgattttgatacccttgatactgatttcagacttctgacttctagaactatgagagaatcaatatagtaaaggtaaatcgtgtgctccttgttatcagcatctcttctatttagtattaccttttccacagagtctaactcattgccttcagtattataactgtgtttcaattacgtattgctgcatgacaaacaaccccaaaatttaatgacttaacaatttatcatttctcacaattctgtgtggcaggcgggtttagctgggcagtccttcttcgccatgtgttgtcatctgggatcactcaggtggctgctttcatctgagacctcagctggggctgatagaaccaacatggcttcacactcacatttctggggctggaagtagaagcataaatgactgggggccaaagtggcctctctctagcagggtagtcaggacttcaagagggtgaacccagaagctgccatgctttgtaaagcttaagccagaactagcacagtgtcacttctgctgcctgatcaaagcaagtcatgaggcatcctagagtcaaggaaacgggaaatagacccacttcttcgaaggaaggaggcacttacatataaggaacgatagaagtttgttgaccatctttggaaaaagtctatcagaaactgtttagtaaatgattattgaattaaactataacagttaattgattctgagattttagaaatgattttttaggaacattttctaaaaaagaattcctagttaaaaaatacccatgtaagctgcccaaatgggaccttgcacacatgaagaattcaagagattgatatttactcaccaactcactgtgtaaaggagtggaaatgtgtttcctggcccacctttgggccagtgacttcacagggggcgtggcagggctcttccaggaccaagacctttcacttccctgtctcaggatagtattgtaataggcagtttagtgatttgggaattctccaccttgaaagcaacttctgaaagggaaggattagaaaaacaacacgtcattagacaggcatgacaacatgtgcctgtagtctcagctacttaggaggctgaggcaagaggatcacttgaacccaggagtttgaggctgcagtgagctctgactgtgctaccgcactcttagcctgggtgacagagcaagactctgtctcaaaaaaacaaaaaacaaaaaaagtccaaaaatcctatggctacctacagaggatcggcagggaaacaaggatactggttggagccctgatcagtcagtgtgctcaaaacagaggccccgaggaggatgctttccttcaaacatggtctgcctgaaagggcttcctggtagatccatcgctatgaatacacagacttcctgagtgtgagattctgaccacgggactcctgacatctcttttctgatcactcattgttttgttaactactctagggagaaaagctagtgtcagcccagtctgaggtagggattggattccaagaacagaatctgagaggattccaagagcagaatcagagatgggcttcctgatgggatttcaaactgagatttctttttattagttgtttctattttattagtttgcatttgatcatatcctttgaaacgcatgtgcatgctttgtcttctttgtacgtttgtttcctttgcgggggatggggggattatttttcttaagatgaggttgctgtttttatcagcaatcactgtggtgaggagacacaggccgttagatgatttctctcttgtggggtggttttataggccagaatctagggaatagctccgttttaatagtttattggcttcccgattgaaatactaactgaaaacccccaggctttggccttcagcatttgttttcatccagtgaccagatttatggtgtttgctccatggcctgtgaataagtcctgtttttaaaaactggacacaacccacacctttactactgtttcctatgcagttccttactcctacatggtggctttgcttgcctttgctagcttttctttttatacctctgtacattactctgttgatccctattcctgagatgatcgagaatgatatgggatgtgtgtataagaaatgggtgtgtgtggatacctccccccccacctttttttcaacacgtttcaccagatgcctttttcactgcacaatagttttcactggtatactttttgttcagaagcatgtgcttctggcattgcaacttttcatatgtgtggcagatcttgaagacagggtttctatgagaaattggagcttggtttaaattttttctaggctgttagatggcagattggattaaaagcctaccaaaatggccaaagctcagatgctctaaaaactcaagaactagacccttggcattaccaagattagatgtggaatatgcagacaaattgaaatagctggagtagcagcgttccacctatggcttaacccagatgggagtaagttgttcttggtgtcaaggttagtgctccggaggaatgtatggccagacaaatgttcacacacaggagaggcacagagagtgtaaaacacagagactactatgttaaaatggcttcagattgatatggaaccattcttgatatgctagtaagtgcagtaagctgattataggacactatatgaggagggaggtgtagatggacctacatcaaaacataaaactggtggctaaatttagttggtaagttcgtggtgatttttagatttctctttgtggcattctttattttttcctcaataaccatatagtgctagaataatatttctaaagcttttaaaataaaacgaaatggtgcctggcaggtgttttctttgattcagtaaacctctgttgctgacctgttttgtccaggccctggctgtgggctctgtggagtctagcaatgaacggatcatgccaagggttgccttgttggtagaggttaccgccactcttgctctctgcaccttatgctttgtgctaggcaagtagagatctgcaagtagcttctgtgtttccccaagggcctctcatcagttgtgcctgcatatccttacctggtgggagagggaataactcaccttttgcatagtctgacagttctgaatttaaagctgcttcattctcactctttatcctgatttgtttgttttcacctgtctgttttatcccattcacaatttttagtggtctccttttttcttcctaggagcttgaacttacagagcttcagtttttcctttttggctatcacttttattgttttccaggctggtttttgatcacatagataaacgtttgaaatgcctgtcactggagaatttacccccagggctcgctatatctgcagtggtaacttattagcctgtttgcttgtttcggtgaactagaattgaactgtttgtaaaccagtgagacaagcgttatttatttgtgtttaagaacatttcaagctctggcagggtactcattttattaactcaaatgatgattctgaatgccactacatttatacctgatgatgcattttgtgaaattattaatgtgttactatcttggtcataattccttttctccttgcctgtcttaaggactctgtccttgtgtttcgcttcactcactcggcaactgtttagtaggcaccagctgtaaactgggcattatactcagtatcttaaatattgtggagaaaatgaagtcagctatggtttcttcttgtgcagagtgtataatctagtgggcaaaataagcaagaaaacaggaagtttcatgtatgacatgctgcctgtgttagggaaagcaaagggtgtagtgtacaaccgaggacaggtacctaagctagacttgagatatcagggaatgtgtcctggaagaagtctgcctaagcccaaagttgaaagattatttggagttagtctgacaggaggggtgcggtgggcagcagaggcggagagtggaggtgttcctggcagaaagtacaatatttgccacaatctagagggtagagagagcatagaatgttgatggaactagaagacatggtccttaacctacagaaatctgtgctctagttgaggtgataagggacacatttagtgaaggtccatggggtcaccatgtttctactctctagcctagtccatctgctcttgtaacatatctctcctgttcagaaactgtcaaagcccataagacagcaaagctgcttagcttggcattcaagtttctaaaaaaaattaatgccagaaaaaaaatttttgtaccttctttcgtcatgaagtcctcttgtcatccagtcagcttaagtacttttcccttgcatgctgtcttctctcctttttaatccagtcttactaatttttcaaggctcattttggtttccattttcttttttctgtctttgcaactccgagtctccctctgtcgctcacccaggctggagtgcagtggtgtgatcttggctcactgcaacctccgcctcctgggttcaagcgattctcttgcctcagcttctggagtagctgggattacaggcacgcaccaccacgcccagctaaattttatatttttagtagagacagggtttcaccatgttggccagagtggtctcaaactcctgacgtcaagggatccgcccacctcggcctcccaaagtgctgggattacaggtttgagctactgcagccggacttggtttccaatttccccacaaaactatccataatgatgtccccgacccaaatgatatattttccaactccaaactcttattgtaaatatcattcacttgactattaaaatggtttgccttatgctattagttatattgtatgtgaatacctgtcttcttaaccaggttttaagctccaagagcactgactctcttttactcttagtatctcccataggattgcgcccaacatgaagcatgtaggtactttaaaaaaatatttgctacttttgtgaaaaaaatacgatcacattacagttttgattaagtagcaagtgagagagaagactcacctattctaggattcagagcagggagattcaaatatgacctaaaatggtcctatgatcttggccttttaaagtaaggctagattacagaccttacatgggcagtccaaaacctatgaaattcttttatatggagacactattataaatggtgattcttctctcagtacaaccatgaaaactaatatggtcatggttagttgaaggctggtgttgatatcagcctaatttctggattcaagatgctgtagagtctacagtagaccttttagtgtagttgagaatcagaagtgagtgaagtttggataagccccttaaataattctggttctcctaccctctacctattgagagtctgttttataatacacaagaattgttaatgttgcatatccttcagacatactatgtaaatatttaaccaagtctttactagcttttggctaatgcagagttgagatgatgctccctggcgagtacatggagctcagctcttttgtgtttgtagtaaattagaactctggccttttagctgaactaaaccagaaatagggttgacatttctgtgttgaggaacctaagaatgttagaaggacacttcctgtatgctcagagtgcttgaacaaggttgaaattttctgtagaaaataattttgatatttttaaaccctgacaaatgcatagttgatacttcaaagtccgcaccatcaggcatggccacaataattttaacagtatacttttgaaaagatgtagtcaaaaacctactttgctcttaaaaacaaaacaattacttaaaacgttcactgaagtttaattttcagtaagtaccttctttatatagcttccaagataaactagttggtaaatatttgctaaggtaactgcatgacatagcttgctgtttgggacaattagcttaattcaattaaaagaatgactttaatcctagaatagtagctccactgcccttttctcagagtggtattatggtcagcagagccagttatctattaggcagtttctagatcatagtgatagaatcatacggtgtgcataagtgagattacgtgtgtttcttactcaaccaagaaatagcagaccacttatttctctggaaattaataactgattcctcaagaagacatatccattgcctttctgtttgtataatgagagattctgaatgagcaaatatactcagggatcccaatactaaactcaaagatttacctttaagtgacttctcttcacagaatcaaaagccaaggaaaggacattaacagtggaaattgatgttcttgaccagttttgctctgaggtggtcaagaatataacaatggcctgtagtggaatgattttgctttctccctgtgtaaaacagtgatcctgtaaaacccaagtttgtaatttattaacaaggaaatgtacatataatcatttgtagctgcaagagactagcaataaccaaaaggcttgtcattagggattaagtaaattacagtcaatcatgcaatagattactctgtagccattaaatggaagaaaatagatcagtgtgcctgacatggaataattttgcagattaggtgaaaaaaaactcaaggtgcagaaaagtgtatataatgtgattatttgtaaggaaaaaaactacaaactaaaagtatatacctgtatgcactgaattttttaaaataggaaagctgaaatgctattacacagttctatatgaggaaaggcactgtggggagtctagtgtgtattttttaacatttgcatttttactttttccattaaaatatctaataaataaaaaaggaaatgaacatattttggataaaatgttcaataaatatttaatgggtctgtaatttggaaaggagtaaggatttctttttttaaaagactttcgattttatgaaataggtaaaagaatatgtataaagtatgtataaggtttaaagaataacaatgcaataaacaccttggatctaacacctagtttaagaaatagaacattacagtagtcttcccttatctgtgggggatacttttcaagacccccagtggatgcctcgaaccatggatacgctgaaccgtatatacactatattttttcctatgcactcatagctgtgatgaagtttagatattaggtgcaattagagattaacaacaataactaataataaaatagaacaactataacaatatgccagcatcacactcttgtgctttggggccattattaagtaaaataaaagttccttgaacacaagccctgtgacaccaggacagttgatctgataagagttggctactaaatgactaatggctggtggcatatacaacatggatagctggatagagagctgattcacatcctgggcagaatggagtgggacagcatgagatttcatcaccctactcataatttataaattaggcacagtaagagattaacaacagtaactaataatgaaatagagcaattataacaatatactataataaaagttaaacgagtgtgatctttctctctctctctccgtctctctcaagatctctctatagatctaaatatctaatggcactcagtttaaaacttatgaattgtttagttctggaattttccgtttaatattttcgaaccatgtttgaccaagggaaactgaaaccaaggatgaggatatctatggtttcgctttctgtgatttcgttactggtcaccagtggttcaaaaatattaagtggaaaaaccagaaagagacagttcataagttttaaatgctacgtcattcacttcactttatcttatcacataggcaatttatctcacatgataaaatctcacatcatcacaagaagtaggatgagtacagtataaggtatatatatagagagagaccacattcatttaacttttattacaatatattgttataattgttcaagtttattattattgttgttaatctcttactttgcctaatttataaattaaactttatcacagctacgtatgtacaggaaaaagcatagtatatacacagttcagtgctatccagtttcaggcatccactaggggtatggaaatgtatcccctcagataagggggggactactgtaatgttccacttctttagctaggtggtagatccaaagtgtttattgtattattctttaaagctcacatacggggactactatactacagtttactcatgttttgttgatgaacaagtggctgctgtgcatatgcttgtacaagccttctgatgcccgttttcaagagtttatctaggccatttaccttggagtagcattcttgagtcactaggtaaacacatctctgactttcaagaaaatcctaaattatttttcagaactgtagtaattttcatttccatgaacagtattctgaaagattcaatacgtggtattatcagacttattagtctttgccaatttgagggtataaaatagtctcttggcatagtttgggtttttttttttttttttttgagatggagtcgctctgtctcccaggctggaatgcagtggcacgatctcggctcactgcaagctccgcctcctgggttcacgccattctcctgcctcagcctcccgagtagctgggactacaggcgcccgccaccttgcccggctaattttttttaatttttagtagagacggggtttcactgtgttagccaggatggtctcgatctcctgacctcgtgatctgcccatctctgcctcccaaagtgctgggattacaggcgtgagccaccgcgcctggccatcccttggtatagttgagcatcctttctactgtttcttgaccacttatgtttattttctgtgaatttcattttgataggtgtgtccatttttatattatttgtcctttattcagtgatcacttgagttctttgtatattctggatactgattatgtaattcttagatatatatatacaaatgttctccccatttgtggcctgtatttttatttttaatttaaaaactttattatccagagggagacactatatcttccaatgctgttcattatataaacatccttgaatagagtccggaaagtccagaacaaaaggcagtcagtgcttcactttgcaatagtggcacagtggcagtaactcatcttgtctctcaacagcatctgtctcccatttctggtgaaaattctagtgaattctcccatgaatacatcacactgttggctccttcgattaatctaagtgatgagttggcaccaaatccattcagtttgtctcatacaacatttaattaaggttactaccagtaggacaccaagcagcaggatgagctcagctttcagtattgacatcaactatgccacccagcatctcagatccaatcacttgtacaaatcccagaaaccaacagggtctatggtagaaactcaaaaggctgtcttttgaagtttttgtattgacctttccatttagtccaagccattaagccaggtacagcagaatgtattagtgattatacagactttatcttatcttatcttaacctgtagattggaagtctaagaaaatttttcatttatattgttatgacttgccctgtgaattgaagcaaacctgagtggctttatgggctgaagtgctatcagtgattacctcagttaaaatcagctgataaattttgtaccatgtttttaattgaatgactcttatagcaggagtaaccaaccacagggtgtgcaaaaataatgagttgcttatatctctgggaagcttctgtgaataaccaagcataaccccattttggagagatcttcgtagacatctgagagctatatgacctactggtggtatttccttaaacatttgaaatttgcttacagccacccctaaggtgcaaatcaccgtgtttggttgggggaagagttaatgcctgctttcacaaaagaaatagagtcccaaggacacacttagtactcctgtaaagaaagcatttgtttacagtttggggagatccctacgtcagttgaggagcatatgttgatagtgcctccattgaacaatcagctggtaaatcttaaagtttctagtttagtccaaagaatgtattctagtccttggttttggaaggattgcttaagtacagtcattccaacctatccagttctgcccacaccaacagctgagtggcattcagctgtcccttgaaatgattgagctatggctacagaaaagggaaggacattcagagatattgacaggtgcttggagccaaggccataacatatagtttctgataggcttctcagtaaggttaaggggaaagcaatcaaattgtgcttcaggtcatctgagggaggctcacagacccagcagttggttaaatttaatgtgctcatgacagtttgggggaagagcagagcattttccttggtgaggaaggctcttggggcaatttcaaaaaacagacaccatttatgttcttcctcccattgtacctcccggggtctgagatagtctcttcccaggtgtcaaggttattctctctacttcctcaaaatcagttctcccatttcaatatttataactttgtcttttttccagttgctccctacttgcaaccagacgttttgtctagaatagtcaggtacaagagaaacaaggcatttttataaattttacagagaccctttatgtactcatgggccactttaggaagactcaacaagctgtgtactcaagcaagtagtcattatcttatgatttagaactaggttaatccttttaagagaatccaggtggctaaatagaattaagttagaatttcctagggctcttttggccaggctgccacatggaaggtgtactaactaggctgcctggatttgtcattaggggaaagaaagaaagaagcattatgccaggaatgctcagggcagaatcccaaattttcaaaataggttaaaaaaaaaaccctcatgcatttcttttttcttttctttctttttttttttttttttttgggggcaagttctcactcttgcccaggctggagtacagttacacgatctcagctcactgtaacctctgcctcccaggttcaagcgattctgtcgcatcagcctcctaagtagctgggattacaggcagatgctacctcaactggctaatttttgtatttttagtacagacaggatttcaccatgttggccaggttggtctcgaactcttgaactcaagtaatttgctggcctcagcctcccaaagtgctggaattgcaggcatgagccaccttgctcagccctccctccctccctccttccctccctcccttccttcctcccttccttccaggagtctcttgttgcccaggttggaatgcaatggtgcagtcttggctcacttcaacctccacctcccagattcaagtgattctcctgcctcagcctcctgagtagctgggattacaggcgtgcaccaccatgcctggctaattttgtattcttcttttagtagagatgggatttctccatgttggtcaggctggtcttgaactcccgacctcaggtgatcctctcacctgggcctcnnnnnnnnnnnnnnnnnnnnacagtcgtgagccgctgcgcctggcccctggctatttgtttatgctgttttaaagccttgaagtcaatggaatttaatttgtatacgtagtagtgaaacaggaaaagttcccttgtcccccttgcagggtgtgtgagtccccctcacaaggtgtgtgatgggattgtagctcgcttcttagcgcccagctgctcaaacctgtaggggaacatacagacaggcaggctgtggggctcccactccacagcagtgtcgaggggtgaatgtttacggctgaagccccagtgggtgtgtgttacagagtgctctttcagtttagctgtccataggcagcttgtgttagtcagctcaattagacccccttgccttgttgcaaggacagagggctttctgtatcccagggttcttgccttgatataccggaagaatttgatcacacgtaggcttggagaattagtccagggttttattgattggaagtagctctcagcagatgggggaaccagaagggagatggttttccgctggatttgggccactcggcggcctgtctcttttctgactgccctggccaaactcctcattgtttcgccagtcgatggcctgctggtgcctgttggtgtattcctgccatccagccgcttgtgtgttcctccgcccatgtgcccctcttgtcatccagccgcttgtgtgcctgcgtgctagggtcttgggggattttataggtacaggttgggggcatggcgggccagggtggtcttgggaaatgcagcatttgggcacgaaggcaggagtgcctgtcttcacctaggtccgtgggcacaggccggagacagagcctccttcgccaggaaccagcccttctcctcccagcacttccctgccctcttctcatatcagtgggagcttgggatccaattgtaattttgtctgtgtggataatcagttaccacactacgtttctctgtgatctgcagtattagctcttacacaaatcaagttttatacgtgtattaatatatgtctgctcctgtgctttctatgctattttattggcttacttgtactcatagtcctaattacatgagtgttatggttttttttagctatctgggtgagtcctccaaccttgttcttctttaagattatctttgctactcttactcttggcccttgatgtgtctatatacaatttaaaatctacttctcagggctgagcgcagtggctcatgcctgtaatcccagcactgtgggaggcagaggcaggccaatcacctgaggtcaggagttcgagaccagcctggccaacatagtgaaacctcatctctactaaaaatatgaaaaattagccagatgtggtggtgcgcacctgtagtgccagctactcaggaggctgaggcacgagaattgcttgaacctaggaggcagaggttgcagtgagccgaaattgcaccactgcactccagcctgggcaacagagcaaggctctgtctcaaaaaataaataaataaaatgaagtcttgcagacacacacacacacacaattactgtttttattggaattgcgttgcatttataatcaatttggggagaatgtcatctttataatatggaatcctctcatctatgagcacagcacatctcctttttttgtttgtttgtttgttttctgaggatggagtctcactctgtcgcccaggctggagtgcagtgacgtgatcttggctcgctgcaacctctgcctcccaggttcaagtgattctcctgcctcagcctccagagtagctgggattacaggcatgcaccgccacacccggctaattttatatatttttagtagagacagtttctccgtgttggtcaagttggtcttgaactcctgacctcaggtgatccacccggctcggcctcccaaaatgttgggattacaggtgtgagccaccacacccagcagcacatctcctttttaaggcatatcattttttttttccaaaaaaaatctcccgattaaaaatatgaaataccaatgtggaaaaaaagaaccttgacctctatctcacactatacacaaaaattaattttaaatggatcatagacctcaatgtaaaagctaaaaccataaagcttctagaggaagatatacgatatctttcttaggtaggtagagatttcttaggcatagaaagcatgaatcataaagaaaaaaattgattaaatagtgaactttgtcaaaaattttaaaattctcctcatcaaaagacattattaaataagttggcaagccacagactagaagaaggtatatgccatgcatatatatgaccaaggaaaagcaacctattaaaaatgagcaaaaatcttgaagagatccttcacaaagggtcataataatgaccaaagcacatgaaaagtgctcaacgtcattagtcgtcaaggaaatgcaaatcaaaatcatgggagatacactgttgcatacccacaaggatggctacaaaggaaggaaaaacaaaacaacagcaaatgttcaaaggactgtagaaatctccatcagaaatctaccttactgttgggagtgtaaaatggtataattatttcaggaaactgtcagtttcctaaatggttagacatgttacagttttattctcggatattaatccaggagaaatgaaaacgtgtccttaaaaagtcttatattagaattttatagcagctttattcataatagtaaaaaaaaaaaaaaggtaaagaacccatgcctgtcaagaggagaattaataaacaaacttacagattcatataatggaatactactcaacagaaaaagaaccagactattgatatattgaataacatggataaatttcataaactctgtgctgagtgaaaaaagcaagccaaaaaaacgtattattgctgggcacagtggctcacgcctgtaatcccagaactttgggaggctgaggtgggcggatcacaaggtcaggagatcgagaccatcctggctaacacggtgaaaccccgtctccaataaaagtacaaaaaattggccgggcgcggtggctcacgcctgtaatcccagcactttgggaggccgaggcgggcggatcacgaggtcaggagatcgagaccatcccggctaaaacggtgaaaccccgtctctactaaaaatacaaaaaattagccgggcgtagtggcgggcgcctgtagtcccagctacttgggaggctgaggcaggagaatggcgtgaacccgcgaggcggagcttgcagtgagccgagatcccgccactgcattccagcctgggcgacagagcgagactccgtctcaaaaaaaaaaaaaaaaaaaaaaaaaagtccaaaaaattatccgggcgtggtggcgggcgcctgtagtcccagctacttgggaggctgaggcaggagaatggcgtgaacccaggagacggaggttgcagtgagccgagatcgcaccactgcactccagcctgggcgacagagtgagactccgtctcaaaaaaacaaacaaacaaaaatgtattattacatttatatgaaattctagaatagacaaaaccaaactgtaatgatagaaatcaaatcagaggttcctttgtggggcgggagtttgctgggaaggggcatgggggatctttatgggatgatggaaattttctgagtcttgataggggtgtggattacgagtgtatgtatgtgtgggttgaatggtacacttgatcacagcattttgctgtgtgtaaaaacgtttcagtttttttaaaatgtgatattctggatttcaattaataggaacataacatgtagagctgataaaaatgggtaggttagggaatatttatgtcaccccttcggagtaattctttaatagttatggagacagtttgttcctaaatgccatatttagcttgagctttttggtcagtggtgcagcctgaggaactattctactttcgtagttcaagagaagtttttataaagttgaaaaagataattcttacaagttcagcaaggattagatttccagaacttcacatgccaagactgtacttctcataaccatactccaaaccagtggttctcaatcaggggccattttgtcccacaaggtatatttggcaatgtctaaagacattttcattgtcatgattgttggggaggggtgttgtgctgctggcatctagtgggtagaagccacggaggctgctaaacatcccacaatgtgtaggacagtcccctgaaacaaagagttatttggtccaaactgtcattggtgccagggttgggaacgcttgttctagacctgtccttatcactgaagctgagtcagtctcagtcaatctggtgttgactctacttatagtccaaatcagttgtggaaacttggcattggcacagattacatatttcttccctgataaaatttaatatcaaatatttgtaaacatacataatcttaaattttgagataaaagttcatggattgagagcacttcagaaatcagaattaccatttgtgttgattgttaaattcttaagatgctgtagattctgtttttaactgtatttaattaaatatccaaacaaccgtacttatcttcctttttttaaaaaaaaggctttattgtcagatcaaagggaataaatgataataaattttttcctccttctttcacagaatgacagggagagagtttttctctcgtttcccagaactctatccttttcttctcaaacagttggaaactgtagccaatacagtagacaggtaagaagagaattgggtggggcaaaatgacctcaaggatgtgaattaccttagtaattgagattttccctctaggcagctgtttttaataaaattcttcccttttttaaatttgtttaaattttttccttgagacagggtctttccctgtcacccaagctggagtacagtggtggccaccactccttgcccatttttgtattttttgtagagatggggtttcgtcatgtttcccaggctggtctcaaactcctgagctcaagcaatctgcccacctgggcctcccaaagtgtggggattacaggcttgagccactgtgcacggtcagactgcttccttgcataaaattggcttttttattaaagtgcttttttgtaattatatcatattgcttggttctctgtagtaaatttgtacctgaaaagttgtgtaaaatcctgtctttatattttaaaaatgctattttatgttaaattttatcaaacttaattccattttcggtggtacagaaactaggaatcacatggtgatttcttctgttatgaattattttcttcctatttttaaaaaaatctgtgtttacatattgagtttgctttatgcatacctgtcattttttattactggcttgttgcaacttaccattgtgaaactatagcgattagctgactaatatgatcacttgtgttcagaaatggttcttgtctacctgagcagaaatggccagtgttcttggaaacacagagcaaagccattacgagggctttccagtcttatagttcaccattgtcttaaaaatcacattctggctggtgtggtggctcacacctgtaatcccagcactttgggaggccaaggcaggtggatcacctgaggtcaggagttcaagaccagcttggccagcatggcgaaaccctgtctctattaaaaatacaaatattagccaggctggtggtgcgcacctgtgatcccagctacttgggaggctgaggtaggagaatcacttgaacccaggaggcagaggttgcagtgagctgagatcttgccactgcactccagcttgggtgacagaaaaatactccgtctcaaaaaaagaaaaaaaaacacacacacacattctgaagctggtagtggaatttttagtatggacatcataaagcatgtcttttgtatttttcctataattttgcacttggtatgaatgtacactaattgtttataattagaaaataaaagtaatgaattttacttctggttatgatgcatttgctcacattagtagtttatgctaatgtgcttttctggcctttagtgactattcatgctttcttaaatacatttggatgttgaaagtttcacatttcatactgtggaacaggcacgtctctactgtaggaacagttctaatcaaaatagcgtactctaattatgtaaatgataagctttgagaagaggatcctgtacgaaagcccatttccctgttttgctagtagttttttcttatgatgcacatttgggagataagaagtgaacgtagaaaaaaaaaagaaaaaaggaaaactatccccttgattgtggagtctcacttcatatacataattttgtttttgaaatggagtctcactgtgtcacccaggctggagtgcagtggcgtgatcttggctcactgcaacctccgcctcctaggttcaagtgattctcccacctcagcctcccgagtagctggaattacaggcatgcgccaccacatcggctagttttttgtattagtagagatgaggttttactgtattggccaggctggtcttgaactcctgacctcacgtgatccatccgcctcggcctcccaaagtgctgggattacaggcattagtcaccgcacccggccatatacataattatttcatgagaaaaatgtttgaaggaggagtgcttcactacctaaatgtgaaatctttcatgtgtaataattgttgtttcagtgatatgggagaaccaaatcgtcatccaagcatgtttctcttacttttggtgttggagagactctacgcttccccgatggatggtacttcttctgctctcagcatgggaccttttgttcccttcattatgaggtagtgtcatgctgtgnnnnnnnnnnnnnnnnnnnnnnnnnnnnnnnnnnnnnnnnnnnnnnnnnnnnnnnnnnnnnnnnnnnnnnnnnnnnnnnnnnnnnnnnnnnnnnnnnnnnnnnnnnnnnnnnnnnnnnnnnnnnnnnnnnnnnnnnnnnnnnnnnnnnnnnnnnnnnnnnnnnnnnnnnnnnnnnnnnnnnnnnnnnnnnnnnnnnnnnnnnnnnnnnnnnnnnnnnnnnnnnnnnnnnnnnnnnnnnnnnnnnnnnnnnnnnnnnnnnnnnnnnnnnnnnnnnnnnnnnnnnnnnnnnnnnnnnnnnnnnnnnnnnnnnnnnnnnnnnnnnnnnnnnnnnnnnnnnnnnnnnnnnnnnnnnnnnnnnnnnnnnnnnnnnnnnnnnnnnnnnnnnnnnnnnnnnnnnnnnnnnnnnnnnnnnnnnnnnnnnnnnnnnnnnnnnnnnnnnnnnnnnnnnnnnnnnnnnnnnnnnnnnnnnnnnnnnnnnnnnnnnnnnnnnnnnnnnnnnnnnnnnnnnnnnnnnnnnnnnnnnnnnnnnnnnnnnnnnnnnnnnnnnnnnnnnnnnnnnnnnnnnnnnnnnnnnnnnnnnnnnnnnnnnnnnnnnnnnnnnnnnnnnnnnnnnnnnnnnnnnnnnnnnnnnnnnnnnnnnnnnnnnnnnnnnnnnnnnnnnnnnnnnnnnnnnnnnnnnnnnnnnnnnnnnnnnnnnnnnnnnnnnnnnnnnnnnnnnnnnnnnnnnnnnnnnnnnnnnnnnnnnnnnnnnnnnnnnnnnnnnnnnnnnnnnnnnnnnnnnnnnnnnnnnnnnnnnnnnnnnnnnnnnnnnnnnnnnnnnnnnnnnnnnnnnnnnnnnnnnnnnnnnnnnnnnnnnnnnnnnnnnnnnnnnnnnnnnnnnnnnnnnnnnnnnnnnnnnnnnnnnnnnnnnnnnnnnnnnnnnnnnnnnnnnnnnnnnnnnnnnnnnnnnnnnnnnnnnnnnnnnnnnnnnnnnnnnnnnnnnnnnnnnnnnnnnnnnnnnnnnnnnnnnnnnnnnnnnnnnnnnnnnnnnnnnnnnnnnnnnnnnnnnnnnnnnnnnnnnnnnnnnnnnnnnnnnnnnnnnnnnnnnnnnnnnnnnnnnnnnnnnnnnnnnnnnnnnnnnnnnnnnnnnnnnnnnnnnnnnnnnnnnnnnnnnnnnnnnnnnnnnnnnnnnnnnnnnnnnnnnnnnnnnnnnnnnnnnnnnnnnnnnnnnnnnnnnnnnnnnnnnnnnnnnnnnnnnnnnnnnnnnnnnnnnnnnnnnnnnnnnnnnnnnnnnnnnnnnnnnnnnnnnnnnnnnnnnnnnnnnnnnnnnnnnnnnnnnnnnnnnnnnnnnnnnnnnnnnnnnnnnnnnnnnnnnnnnnnnnnnnnnnnnnnnnnnnnnnnnnnnnnnnnnnnnnnnnnnnnnnnnnnnnnnnnnnnnnnnnnnnnnnnnnnnnnnnnnnnnnnnnnnnnnnnnnnnnnnnnnnnnnnnnnnnnnnnnnnnnnnnnnnnnnnnnnnnnnnnnnnnnnnnnnnnnnnnnnnnnnnnnnnnnnnnnnnnnnnnnnnnnnnnnnnnnnnnnnnnnnnnnnnnnnnnnnnnnnnnnnnnnnnnnnnnnnnnnnnnnnnnnnnnnnnnnnnnnnnnnnnnnnnnnnnnnnnnnnnnnnnnnnnnnnnnnnnnnnnnnnnnnnnnnnnnnnnnnnnnnnnnnnnnnnnnnnnnnnnnnnnnnnnnnnnnnnnnnnnnnnnnnnnnnnnnnnnnnnnnnnnnnnnnnnnnnnnnnnnnnnnnnnnnnnnnnnnnnnnnnnnnnnnnnnnnnnnnnnnnnnnnnnnnnnnnnnnnnnnnnnnnnnnnnnnnnnnnnnnnnnnnnnnnnnnnnnnnnnnnnnnnnnnnnnnnnnnnnnnnnnnnnnnnnnnnnnnnnnnnnnnnnnnnnnnnnnnnnnnnnnnnnnnnnnnnnnnnnnnnnnnnnnnnnnnnnnnnnnnnnnnnnnnnnnnnnnnnnnnnnnnnnnnnnnnnnnnnnnnnnnnnnnnnnnnnnnnnnnnnnnnnnnnnnnnnnnnnnnnnnnnnnnnnnnnnnnnnnnnnnnnnnnnnnnnnnnnnnnnnnnnnnnnnnnnnnnnnnnnnnnnnnnnnnnnnnnnnnnnnnnnnnnnnnnnnnnnnnnnnnnnnnnnnnnnnnnnnnnnnnnnnnnnnnnnnnnnnnnnnnnnnnnnnnnnnnnnnnnnnnnnnnnnnnnnnnnnnnnnnnnnnnnnnnnnnnnnnnnnnnnnnnnnnnnnnnnnnnnnnnnnnnnnnnnnnnnnnnnnnnnnnnnnnnnnnnnnnnnnnnnnnnnnnnnnnnnnnnnnnnnnnnnnnnnnnnnnnnnnnnnnnnnnnnnnnnnnnnnnnnnnnnnnnnnnnnnnnnnnnnnnnnnnnnnnnnnnnnnnnnnnnnnnnnnnnnnnnnnnnnnnnnnnnnnnnnnnnnnnnnnnnnnnnnnnnnnnnnnnnnnnnnnnnnnnnnnnnnnnnnnnnnnnnnnnnnnnnnnnnnnnnnnnnnnnnnnnnnnnnnnnnnnnnnnnnnnnnnnnnnnnnnnnnnnnnnnnnnnnnnnnnnnnnnnnnnnnnnnnnnnnnnnnnnnnnnnnnnnnnnnnnnnnnnnnnnnnnnnnnnnnnnnnnnnnnnnnnnnnnnnnnnnnnnnnnnnnnnnnnnnnnnnnnnnnnnnnaggtgttatcaccctcatttgcccgttgaggaaattgaggttcagagagcaaggcagttacagagctagaatttgaacccaagagtgcagggcttgtcaagggtgttagatgtactctttctgttataccaaaataaccttgttttttggttgccttttgagtagccagtaacttagctacacggaatggacctatagggtgtgaaatgtatgcaactgagagagatgaggagcctatatccacagctgctgtgtctgagtacaggctgtcttctggatatagacgtaatgtctctaccaatggtgggatctgttccttattttgcttttcctgtaggaaaagtgactgattggattggttaaccatgtgtggcacatggtgacaatcgcctggggttataggactggtttgtggccagatacagtagaagcctggctcttctttcttggccaccttctgtggtaaagtggaaggccctagatttagttagtttggggtttcatcagcctaccacagggaaaacccatgctaccccaaaatgttcactggcgaggtgaactataaacagatttttaaaaagcagtgaatgtgataaaactgtatgcatttgatttagatgacctctgagaatattattcatgaagaaagtggaaggctgatcataaaacctgtcattccaggcagtggttgtggttctgattgtggtaaagagtgggctgttttgacttggggtaatagctaaaaagatggatgggtgtatgcacagtgggtcagcagtgttttatttttgtaccgttgttaagggtaatttatgtacttggaagggttttcatcaggctcatggatactatgagtttggccaaagaaaaaaatttcagtttgtgggagtagtgcaaaggttgctctgactgctaaaagtgaattgcacaatgagaagaagattaaaagcgccaacaagagctttttgtttccctttgatttatgtgtacttacctgctatttccttcctctctgtaaggtatttataagtattatatgtagttttactcctttatcccatgtttaagagtatacctaaacatatatgccattatgattgttgcatcctcttgggacagaacttataatgtcaatcccaacatcttgtatacaacttttaaaaaatccagtgtattttatgttctgatgttgtgctgcatccagatacaaagccctttaccatgtgaatgtgatgctttcaatttaagaccattaattcattcttcagttcaggtaccacaaagcagaataattcatgctttaaaaagaaccttgactggctctctgaatgcagctcaccagggcctgcttctctgggctttctagagactagaaagtcttttcagaggccaaaaagtccctgggcatacatctctgagttccctttcacaagcaagtttcaagttccagtcaaagagctctaggtaaccacatatgcctcaaacctaggaccatagaatcctgaacaaaggcccaggagagcttagacgaatcaggtctcagaggccgaggcgggcggatcaccaagtcaggagatcgagaccatcctggctaacacggtgaaacctcgtctctaccaaaaatacaaaaaattagccgggcatagtggcaggcgcctgtagtcccagctactcgagaggctaaggcaggagaatggtgtgaacccaggaggcagagcttgcagtgagcagagattgtgccactgcactccagcctgagtgacagagcaagactccgtctcaaaaaaaaaaaaaaagaaagaaagaaagtaaagctacttatttggtaggtatatgaagtcaaaagactgatgctggtgacatagcttcaaatgctggaaagtccaagtgaaaattcttttgaggagatagggaaagaatctcttgcaactttatagcatgatgctttatgattatgctgttaatggctaaaagtagccataaaaaaaatgaaggcaagctagattgcatgcttatcaaatttgtgagcaaattaagattcaaaataaccttcaagcataggactgacaaacacaaattcaggcataagaccattacctctgaatggggaggaaaggggtgaaattgaggagccatgtactagaagctacaattttatttgtgatgtgttcttaaattgggcattgggcaaatgcttgaatgtcatcctattctctagattcttttcgttgttgtcatcattttgtatgtctgatgcagttcatcatttaaaagtaagattcgaaatagcctggaccagcctgggcaacataaggagaacctgtctctacaaaaaattttaaaaattagccagacttggtgatttgcgcctgtagtcccagctacttgggaggctgcggtgggaggattgcttgagcccaggaggtcaaggcagctcaagtgagctgtgattgggccactgcactgcagcctaggtgacagagcgagaccctgtcccccaaaaaagccttgaaagactggattgatgggatgagactatcaagataacatttaatagagatatatatcattctgattttttaaagaaaaggcaaaattatatacatacaaaatgagggctatctggcttcatagcagtttttgtgggggaaaaaatatcttggtgaatgagatatcctggtgaaccatgagaaagcagcatgacactgttgctgcttccagatagtggaggctgtagtccccctgaactctgttggttagcctaaacccacattattctccttattattctgttctgggctccccattttaggaaggtcactgaagaactagtatctgtcgaggggaggtgaccaagatgaggaggaaaccaaacatctggaaacagttagactggagaagacttagtggcaacatgataatggtctttatatacttgagagactgccatatggtagaaggcgcataatttctcttttttgctcccaatgggaaaatggaagatagatttcagcttttaatttaaagaagaattttgtgaaaattagtattctctatcaaggaaaagaacatatttccataatactgagtttgcccatcagcaaaagtgttaagttttcaaggaaaactgatcacatgttgagcatatatctgcagcgcacctgaggttggactggatatcatcaaggtatctgtttggcatgccttatttcagaataggtgaacaactcagctgtggattctgaatgttcagtgaatgaaatgatcaacctgcctctaatcctgtgacaatatttgtacatttttgtttatgggtccttcgatctctcaaagaaaagaagttgggatgccattcttggcatggcccaaaaagtcacagtggtttgctcttaaatggcaccctccaggaattaatctactaaaatttagcatttaagtaacttctgtaactgtgttctggatagttctgaaaacatatttttggcctatgagatgttatgtctgaaaagcattctttattaatttaattacctttttttgtggttcctgtatttttctccattccagatgttggcttaagccacattttctgacaagcaaaagaacatctgagtctttgagaagtcagagatgcttttctaaagagtggttatagtagataactctttattgtcccaatttcccaaagtatcttgaacagagttgcctggagagagagtacaggggtctccaagccttgctcattacaagtagaaacacctgagaaatagggctttgccagtactgttgacatagaacttcctgccctggccagcactctacctggtctgtggttactactaaattccatgaggttcagagaagggaattataggaaaggagtatgcccccacccttcccccgctgcccagccatcctaatctgctaacagttgttgggtgaaaaaagggttctgctatcccataattctgtggaaaccctggccccttggtttcactatgtgactgtctgataccaggtcaggcttgggaccagattgttgaggcacaggtgttcagtgctgctcagttttcttctttgcttataggccaaacttgcaaaacatgtaaatgcccccagtgttatcttccatggggtatttgtatattacagatacatacattttgaaataaagcagtaaaactctaatggtggcgttttaggccttatatagggaggatctagaagcagagattggaaggttgtttcctattgctggggaaatcacattgtttgggcagctacttactctgcctcctttttactgtgcctagcactttatttggagggctgtactcatggccctctgaatttctgaattctacccagggtagctgaggttcagcatgtagtatgaaattatgttttgcattatgtgtctttttttgcaaatagttctggcataaaaagataccttgttatctgtcaccaatttttatctgttagttcctagataggggcctggccaacttcatttctggtgccagatctctttaagaccattttctaaatatgtttttgagcagaaggaatgaggagttcacctcttatggaatgcattgacaaagcaaactagaaaaacagaacttgtagggaccagcttttcttcagtgttatctgttatcccaacaggccagtttaggtcatgttagaacaagtgatttgatctgcacacagtcccattcttaggtgaaatttctgacaatgatgataatctatggcctattgctgccattcatactagaagttagaatctaatcagttaattgagtaaccaagtatttgttaaacattcattgtgtacctagctagtgttaggtcttgggtaagatgcaaagtaaagaaaaatgtctttatgcttaaagaacttaccgtctagctaataaggtaaaatacatgcttgtgaacctgataccgtgtatattaaccacttaattatatgacatatacactaaggactgaggcctacaaagaaggggaagagcatcagtgggttggagaagtccgggaggctttcccaaatagcaaggcaggaagaaatgtgggagttcagtctgccatctcagggacttttagaaatcacccatggtgattaacaagtcatgtgagaggagtgaaaagtcagggggatccaacaaggggaagattgtgatggagagttttatgattcataacttggaaggcatcataaagagctttgcttccacttgaaccaagggcgacccaggaaattcacaaaataaatggtttgctatttaacaggagaaaccattgatggtgcacctttggtaactttaataaagaacagtatttgtcctgagtgttgcatttaagtcttgtggaagtaatgaattgtagtgggaaaaaaaatttaaatttagtaatacttaacattttaaagtatcttaacagtgtttttccatacagaacttttatttccttgttcttaaattgtttctcaaaaattgtagcaaaggtgctctgcaggcatttttaatgctgaattgaaggatttcacattaccaagccccaaatgctgactgataggcagtcatcctacacagtagagaacattttagatcaaaaatgtgtttttttcttccagaagaaaataagaattgggaaatagaataagaaggtaaagataaattatagaaggcttcaaatgaggacaaggaaaaataatgacatagtgtgtttcggttagctttctctgactggaatgggttttccctttccctctgggccttggcccccaccgtctatttctaatcttctagtaaaaacaagctacacatgttacatcagctgctcaggataccttcaccctcacgtccttttactttttccttcctcactcactttgaacattgtgactcttgactgctcatcttgcctcccttccaaccagttatagacattctcttcttcaccatttattcttctctgtctctttatattgtgatcactcttcatcaccagttcatccttccattaagtgtatttactgagggcctactttgtgcccttgcccaacccaacacccctactctcatcacctctcatttgcaagagaagatgtggaggccatcaggtgtgggttctgtccatggagaaacccactccacccacagtcctctcctttgttttatagccaggctcttggaaaaggtggtctgtgtttagtctccacttttccccttcttaacccactgcagcctggccgcttcttccactgcctcactaaactgcaccaacaaataggagtgacctccttattaaaaaagccactgggtgcttttcattccttctcatttctgctttttctctggtgtttgatgctattgcagactcctttcttcttgagttctttcttctgtggcttctctggccgttatttctatctctccttggagggcccccttcctcccgctgcctctcaaacattggtatacctgtttgtcctgccctcaaaccttttctttttcactttgcatgctctctctggggttatcactcagctacacttacctagtcctagatctagaactcatatagaatcacaagttcaactttctattggacagcttcttctgcatgtctcacacacatccaaaagttgagaatttcaattacctctgcacactgaagtttgagcagccttcttttagggcctagtacaatgtctgacatcttgctctacctggctagctgcagtcagggaacttctttaagggaaacatatcagaatcaggactcagggtggcacagaggttcctcccgctgtcagtgactgtgttcatgcatacccagtaacaaaggagcattggtttaaaaaatcactgacttctgaaagcgctccagtaagcttgaaatgatttgctttgcttcttacgttgattatcatcagtttgaggtagcaagtagcaggtgcttgttcctttctttggaggtgaaaagccaaggcccagagagagtagacataatatgcccacattcaaaaagtgactccctaaggagtcagggcaaattcatttattcattcactcaacagatatttattgaaaacaattatgtttcaggcactagaaacagagtggtgaatcagacagatacagtttttggcataatgaggtatcctttttgacgatgcttcttatctcttctttgctcctattttttccatcctgattagtgataaatgataataattagcaaatgtttactataagccaggcaatattttaggactttacacatattaactcatttaatcatgatgacagcactatcaagtcattgtcgttactatcccattccacagagggggggaatgttgggcagtaggaactttctaaatgtgtcctacctagctcatactggtagtgataaggcgtgaatttgaacccaaacaatctgactctagaacccatgctgttagcgactgctttagctattctagctcttaacactgtaatacttgcttttgctcatctgtttatgatgctgtgtctgtgaagtatgacagggtagttctcagcatgccaaaattaacctgcagctttacctaacaaacatttggacttactttgctttcttgagatatttccccccttgggcatttcgttggcagtagtctcattttctaatctgaaatcaggagaaaaggaagaaaaacttgcaataaagcttaagtggttgtgacaggttgctaaataaaactggctcaactgaagttttgagattcttgagaaacactgagaatttcttacaaaagaaattttccttattataataggaaatcatgggtcattgcacagttataagtgtcttagtaaagagagaatgtggcttgaggctaagaagcctaaaatcttaatgagattatttgtgggctgctatttatgcataatttttaaactcttagaaaatatgttttctatctgtctttagtatgtcatcttaagtttccactgctttacgtaattttgaaaatctttagggttgctagaaaaaaaaaacaataatagcaaatgtttacataagaatttaagtttagagtgtactttcacatatagtaacttgattgtttctctttttactctcttataaagaaaacagccactccgtctcaaaaaaaaaaaaaaaaaaaaagaaaacagccatgaggatatcaattcgtgttgaaacttttttaaattgccaatgttttcttatgcagtaattgtaaactgatttggaaaaaaaggaaatctaaatctgtgaagcgtttacattactgaatagtatgaaaggaaggttttgttacttaagattgcatataataacttcaggaaactgctttaatggataagtaacaatagcatctggttgttagttgatcatctgtactccaaggcctctgaagtgggttcacaccccccttggtttgccaattttatatcttttatgtacatagtcctacttccctcttttcataattatccaaaggttaccagccaaaacctgtgtggagggtacacggaggatgagatgtgtcccctggggtttttgcattagggaaaattcctgatctgggacatttgtgccctgaccaccagcccccaagagatgccacatttttgtctactttagttgaaaactctcagtcctacagtaggctgtagtaggcctcagtctgaataatcacaaaaccaagaaacattaatgagatttttctgttcagtttctacagtgtccggagcattaacaaaatatatatttgtatgaaatctacaggctactgtgtaaataagcctgctcccttttggttattaaatcatacaggaaagaagcatctgttttagcagaaactgtggaaaaatatatccaggtagcccaggaaaagttgaattgttactgacagatgtgtcaccacagacaagaaaagaatttacaaagcagtggacagacaatattttcagacaataatctgtctttttgggtgatgtgtgggtagcattggtttgtttcttgcctgaatgtttattcatttttttcccaggagaatcccttttgctcagcttctttctggtttggataaaatgaaaagtaaaattgacttaatactaattataacctgcataattctactgaagagaaacttaagaaatagaattattttttctagttaagcttcagggtcatataattattataattcaatcatttattatccccccacccttttttctgtgtgatttaagacatcagaatttaatttgtagccagaatgaaaactggacttaagaaaagcttgactagagagagatttgcattctgctgcgtggttgaacatgtctctaaagtagcagctttagaatgccatgtcctgatagaattccccgttgaaagctagccagcagagcagcttccttgtgtcctcctccttgcctgacccaccgtgaagcgtcacgagggccctagatatgaacctcgggggctccacagcctgacagaagagaactagtgtcgctgggcaatccatgatctggcacagaagccccaggctctagattttgtaattggccacccaccctggcccaaccttggataaatattcctgagttctaagtaggatgaggaatttaaatccctgttttttcctgagttcttccataaccagtccacgacattgttatgagatctgagtggagtgcccatgcttggagagggaataaagggagcacgttctactactactaatgaatacatactcccattaacagtccctttttccctaggaatgatgccactggaagggccagatgtgactccactgtagtcactgacccagaccagctttacccctagggtaattgaaacctatattaaatgatttgacaggtcataagcagtgccctctacccacttaattttctcagatgcctcctccattatgagctaaaccttgtagattttcattcttttagtatatggttttgatcccttctaaaatggacatctcaatgaaacataaattacttaaaagttattagtagtcatttatgccatagtatgaattagtttacgtttctttggttttgacaggaagataaatagaatacgttggggagaaaatgtagaactcgaaacaaagggagaaagcaagttgccacctttggaagactgcagtgatttctttcccattagaatttgctctcatgttttcagtgaagcatggcatcgtgttttccattcacctctcctttctggcagggaaagacttggagttctttttacagctttaactctttcttaccccttctagatgtagttccatttcctttctaagatgaaagcttgtctttgtgccctcccagaatagttccaagcagcagaacacagtgaatccttccagataaaagaccctgctgataaagtgccagattgttatcagagaagcagtgaggggagtcaagtccctaccattaattacctagttacagttttgtttatatcctgttcatttggggcatgtttttcttggacagtttctagtctgtgttctgaactgaagtctgaagtttgtaaaaatcccaaaggtcaaggaatagtgggttccttattttctgaaaggtttaatggcaaggaagagaagatcaaagtttctatctttcatctggaaggaaatagacaaatgcttcattttggtggttcattccccacctcaagcatacaaaccatagtatgttggatgaactctgacttcgaatacctagccaagaggttacctggaaatagaatgacatgtatctctgtgaagacgtgagtatcaaccaatgaatgactagatatccacgcatcaaggccagagtccagttgaatctaaaataaagcttcttggtaaatgtacttgatgccactgaactgtacacttaaaaatggttaaaatggtaaattttaggttatgtgtgttttaccacaacaaaagtaaatattacttcctgacagctccagtgcttcagtcacagttgcaaatacagttggacctcatccaatcatttatggattcaaccaactgtagatcaaaaacatttggagaaaaagtaaacacaacaataaaacacaatgcaaatgtaaaaacaatacaacataacaacttacataacatttacattgtattaaatattataagtattctagagattatttaaggtgtaccagaggatatgcataggttatatgcaaatactgtgcatactttacataagggacgtgagcatctcacgggtcctagaaccaatcctttgaggattctgagggccaactgtacaatatgggtgggctgcatggcctgcattattttgaatgggattgctgttgcatataaagcattatgtatccatttaagaactgtgggactgtgagtaccgaataccttaatgaacagaagaagatgaagagaccattttgtcaccatcatacaaacatactaggaagtttgggattggaaaagagccctttctgtcttgaaaatgattgactctgaaccatgatagccactctctttctacaaatgaaccaaaagaagtggcaatgggtcacttgatggctgaaatagtagtgcctaaggctttgattatcaaatagtgatattgatatgttccacaactagaaatgtagtattaggtaaggcaacctcatctgtggtatctggcagccattaagtagccaagcatatatttcttgaccgtattaaatttgtatctcaccttatgctgctgtattaggttctgtccaaaacccaacccatctttgctaatcagactgctgacttacgattcagccagccctcttagcctcactggtgatggggcgggggtggtggtggggttttaggactagactgttgtgtttttctcatcaagccaagaaacttctcagaccctgcaaacatgttacctggtaacatagctacagtatgaattttaggatagaaagaaggaagggagggaggaaagggaaaataaagaaaatagccctatgacatagctacagtatgaatttttaggatagaaaggagagaagaggggagagagggaaataaagaaaataaccctatttcaaatcatgaagctttttttatcgttaaccccaaatgcccttaactcagaactctgaccaaaagatgtctcttttttccctgtgtgtattgaactcatgcactcatgcctatcatcatttgaaggtagttatgagacattcattatgacttcaataacttgcacatatttaaatttagtgttttctttagaaaaggctagaagatgtagggatttaggaagaagttaaggtaaacttaaaatatataaaagctcactttgagtgaaaacaagtaaaaacaagccctgaccttctcagaggtaagaaaagttgaaattaaatgtattctttaggaaataaagactttgccaagaatagcatggttagttaaagcagtctggtgtggaaggtgtgtcttttaaaaaataagatttctttactttcttcttgactaatggttttgtgcagaagaaccatttgaataataaatgaaatgctttgaagtatataggggagtggagaacttttctgtgacttgtatgaactggtgatacagattataaactaagtgatgccaaattccaccagtttacccaggctctgaacactagcaaatgtagtcaaagccatagaaatctgctgatgaaatcatgaaaatgaacagaagtgatccagattgtttaatttcttttgaaatattatatttattagattttagcacccaaaagttaaacagtattgaatttcacacatagcactttatttttaatcttgggttgaagattatgcacttggcatgactgaagagtgactcatacattttgcaccgactttattattagtagtattattttgataggcaaggaagaaagccggggagtaagatgatactgaattgaggctaaatttgttaattgattgaactcaaacggaaataaagaatgtcacttaattttcttctttttatattcatgtgtgtatcccctgtgaagactttgaatgctactcatgtttaaaatccaacataaaatatcatctgatcatcaaaattggcagtgggaattagcagtattttcttctaattaatgtctcaaactgtgccacagctaaaatctcatcacctggacactttgaaagatgtgaccagtattctttactgacatgtttcccatcttaaaacacaatcaccatgaaattaatataccaagtcttggtcacaatccagggaaagacttgaaggcaatgtgattcttctcataattagcagcctaattaaatgctagagggcttcagctgtatagtaatgtaccgtgcttctgaacaaagataccaccaccattgaaactgtatacttgtaacactagtatatttttaattagtggcagggtatagatgtatgtaatcagttttgtttcatcttctaactttgcacagcagtctccattgtgcattcatttggaatatattgaaaaataatccactgatttggcttctgtttgtcagaatttagggtgactaaaactagtatgagttgaaaattaccttttcatgatggaataagcaaattaaaaggctgttcaaaatattagaaagcaggtttaatctaatcaagttggggggaggggaatcttttaccttaataaccactacgaaatcataccgctgaatacagcaggtgagtttattaaagctggcccaacaaatttgacatcacttggttgaataattggagctgtcaagtgtccttaaaatgaataaaattgaatttcttttaatatgtgctattgttgttcacttctatggtggtaaaaatatcagagatggggaacactcatttttgcaactagcacaggctctgcagtgagacagacttgactttgaatcctagctcatacattcattccctttgtgagcctgggcaagtcagttaacttctctgagcctgtctagaacatgtgaaagattcagaacattgtccaaaaaaatttttttgttttttaattcttgtgtgattgttaggatttaagtgtttattgatttgattttttaaaagagcacaaggaaacattaattctggttgtaaaagtttaaaggaaatagctgggcttgtttaatctgaggaagagaagacttgagatgttttggagatggagctggaggctaagaaagcaagacagaatgtataacaacttttctaatgtatatgaaagattattcttttaaaaacaactttattggggtacaattgacgtaaaataaactgcacatgtttaaagtgtacaatttgatatttttatatacccataaaaccatcatcactgtcatggtaaggaacatagccatcatcctttgtaatccttacccaacctcccctcccccacctccctggcaatgattgttttatgttctgtcaatacagattaatttgcatttcctagaattttaagtaaacggactcatacaggatgcattctattttgtctggctttttcactcagtataattattttgagattcagccatgttgttaggtatatccgtagcttgtttctttttattgccaaatggtattcgattgtatggatatactgcaatttgtttgtgtacttagctgttgaacgacatttatgttgtatccatcaactagtaacaaataacttgctaggaacaatcatgcacgagtctccttttggacttaggctttcatttctctagtgtaaatacacaggaattgaacaggtgagctgcgtggtgagtatatatttaacttgttgagaaactgccaaattgtcttccagagtgattatacattccccactagtagagtatgagaattctaattgttccatatcctagccaacacttggtatgctcagtctttttaactttagcctttctagtgagtatatagtagtatttcactggggttttaatttaaactttactaacgtctaaggatgttgggcatctttacatgtatttggcattcatatatcttctttgctgaagtgtctgtttgaagctttgacccaatttttctgttaggttgtttgctttcttttcttctctctcttattttttttttttttttaagagatgagatcttgatctgacaccctagctggagtgcagtggcacagtcacagctcactgtagcctcaacctcctaggctcaagcaatcctcctacctcagcctcctgagtagctaggactacaagcacatgccaccatgcctggctattttttttattttttgtagagacagggtctcattttgcccaggctggtctcgaactcctggccccaagcaatcctgctgcctcagtctaccaaagtgctgggattacaagtgtaagccatcatgcctgcttttgttttcctattattctgaatatattttggatacaagtcttttagacatagatttatttctttccctggcatgtagaaccagaaaaacaaaattaaattgcagcaagaaaaagtataattatactgtataaggaagtattttttttgactggcagtataaacatgcgtactgggataaccaaaggaggatgtcagactttctcaggggtatttaaaaactgactggcagtagtctatttgggatactgtaggcatgctgaaatatgactcaacttacctaattgcaattttcatttgagaaaagataccttgaatgagtctgttgctaatatctcaatatctgttgctcttttgtgtcatttttccaggccaaaaaaaaaaagcaattttttggaatttttcaaaactttccttgtactttattatttttaaaaattcattctttctggttttagcttgaagtgtttctgtgaaacatgaggagggtcattcaggggcattaattagcttcagcaaaaacaaaatgcagtctctgcaaagtaatcaaattaaaagaaatactcaaatttctttcatacagcagtagcaccaatcattgttttagctgatggcactgggaagattcatttaaccctctgtagatgcaaaataattaatgagattctagagaagaggttctacatgatgaaaggagttggagtggttgtagccctcagaagagtaaagggtgctttcatgatgggattccagtagagttaatgaagggttttcctctgtgtagaaaacactggtcatttgttctccaactccacagaggctcaaactagagaagattggctccaactatagaaagattgagtatggttagtgttagacataaaacttttattattagcatcaatattatgagattaaacaatggaacaagagaggtcataatgatattttaaaataaaaaagatagctatctgcctggaatgtttaaatgtccatgattgaattttgtttttgaaggggactttggagatcatttactctaataagcttttatagatgaggatgtgaaaggacattatgtaacttgctgtggccacattgttagatactcatattttaatttgaggatgtcttaaaagtagccttgcgtaagagactcgaaggaaaccatgtaagtgcttctgcttcacagtaggtttcacttcaccaaaaaagtcacttaaagctgatgactgtgtatttcttctacacccaagaaaattctgccaatgtgctgacatgtatgtgtcttttcttgtcgttagtaatgttgaagatttttattcttgggcagttcaaacttgtctttaaataaatactatactttgctcaggggcaacctaatcttctcagtatcgttccaattttagtatatgtgctgccgaggcaagcacaaaatcaatactatactttgaatgactgtaagtgatttgacctgaggtgatcagtactgagagaggataccaggggacactgccacagcatttgtggaacctgtcgcagtctgctgtggggttcttcataaactgttggttgatggctgcaacttggtggatgacttgcttcaaagtcctggtgactaatttgccttccttaaagataatattgaataaagctttaggctttgttttgtttaacactagttagagcagtaggaaacatatttagactaccaattccttatgtatgagacctgtaaatatgcattccagccattgaaattagtgggataaattgcctacaaaggtttcctcattcattatgacaacaaaaaaaattggcacaggacattttatttggttgtggttacattttatttgggaatccatcattctttttatgttcccatagactatctagagtgaaaacccacatatatttatataatattatatactttattttaaagggtttatctaagtactaaaaatgagagaaaatattttaaagtacctggcatctagcaggcactcagtaaatattcctaccttcacttccttttttccttccttctttttagcgtggatatcagaatcttttataaatgtaacagattattgtcaaaaagggaagttaatagaattggtgtatgttgagcattcccttgactcacaggatgtttagattgtctaagattttaatatcatttcagagataatcacctgaaaaattaaactggtcaaagaaaaatttactcagcacctatgatttgtgcagtcaaccttggactagaattagagtactttgaataccagaataagaatatgtatttaatgtgacaatagagagctatcataggttctagaaaatttgaaagctaaaaaaaagttttttaatgtcaataaaagcattcctttctaaaccttctatctatatatagtagggttatatataatagggtttaaaaaataagatggtaaattctctctattcctttgtgtagtgtnnnnnnnnnnnnnnnnnnnnnnnnnnnnnnnnnnnnnnnnnnnnnnnnnnnnnnnnnnnnnnnnnnnnnnnnnnnnnnnnnnnnnnnnnnnnnnnnnnnnnnnnnnnnnnnnnnnnnnnnnnnnnnnnnnnnnnnnnnnnnnnnnnnnnnnnnnnnnnnnnnnnnnnnnnnnnnnnnnnnnnnnnnnnnnnnnnnnnnnnnnnnnnnnnnnnnnnnnnnnnnnnnnnnnnnnnnnnnnnnnnnnnnnnnnnnnnnnnnnnnnnnnnnnnnnnnnnnnnnnnnnnnnnnnnnnnnnnnnnnnnnnnnnnnnnnnnnnnnnnnnnnnnnnnnnnnnnnnnnnnnnnnnnnnnnnnnnnnnnnnnnnnnnnnnnnnnnnnnnnnnnnnnnnnnnnnnnnnnnnnnnnnnnnnnnnnnnnnnnnnnnnnnnnnnnnnnnnnnnnnnnnnnnnnnnnnnnnnnnnnnnnnnnnnnnnnnnnnnnnnnnnnnnnnnnnnnnnnnnnnnnnnnnnnnnnnnnnnnnnnnnnnnnnnnnnnnnnnnnnnnnnnnnnnnnnnnnnnnnnnnnnnnnnnnnnnnnnnnnnnnnnnnnnnnnnnnnnnnnnnnnnnnnnnnnnnnnnnnnnnnnnnnnnnnnnnnnnnnnnnnnnnnnnnnnnnnnnnnnnnnnnnnnnnnnnnnnnnnnnnnnnnnnnnnnnnnnnnnnnnnnnnnnnnnnnnnnnnnnnnnnnnnnnnnnnnnnnnnnnnnnnnnnnnnnnnnnnnnnnnnnnnnnnnnnnnnnnnnnnnnnnnnnnnnnnnnnnnnnnnnnnnnnnnnnnnnnnnnnnnnnnnnnnnnnnnnnnnnnnnnnnnnnnnnnnnnnnnnnnnnnnnnnnnnnnnnnnnnnnnnnnnnnnnnnnnnnnnnnnnnnnnnnnnnnnnnnnnnnnnnnnnnnnnnnnnnnnnnnnnnnnnnnnnnnnnnnnnnnnnnnnnnnnnnnnnnnnnnnnnnnnnnnnnnnnnnnnnnnnnnnnnnnnnnnnnnnnnnnnnnnnnnnnnnnnnnnnnnnnnnnnnnnnnnnnnnnnnnnnnnnnnnnnnnnnnnnnnnnnnnnnnnnnnnnnnnnnnnnnnnnnnnnnnnnnnnnnnnnnnnnnnnnnnnnnnnnnnnnnnnnnnnnnnnnnnnnnnnnnnnnnnnnnnnnnnnnnnnnnnnnnnnnnnnnnnnnnnnnnnnnnnnnnnnnnnnnnnnnnnnnnnnnnnnnnnnnnnnnnnnnnnnnnnnnnnnnnnnnnnnnnnnnnnnnnnnnnnnnnnnnnnnnnnnnnnnnnnnnnnnnnnnnnnnnnnnnnnnnnnnnnnnnnnnnnnnnnnnnnnnnnnnnnnnnnnnnnnnnnnnnnnnnnnnnnnnnnnnnnnnnnnnnnnnnnnnnnnnnnnnnnnnnnnnnnnnnnnnnnnnnnnnnnnnnnnnnnnnnnnnnnnnnnnnnnnnnnnnnnnnnnnnnnnnnnnnnnnnnnnnnnnnnnnnnnnnnnnnnnnnnnnnnnnnnnnnnnnnnnnnnnnnnnnnntggtttgaattgcaggaaaaggagcaactagttcgggtggtggtggtagatcctttgatgaatggaatattggcataggaagaacaagtagagaatctggcaaccttggccatcactgaactcacctgagaatgtggaaaagggcttcaggaatgccacatttataacaaaaacatatttaatacttacaggtcgtgcagaaatatctgctttttccaactcactggatacaaacttggtgtgtgtgtgtggtttctctcttttatgcatgcacacgtacccacacatatatgttttcctgaaggcaagatttgaaactacgaaccacacagaattaaaaaggaaaaagaaatcttagtataatagcggtagagtcgacagaaaatagacttgggccctggacctggagaataaagccaatgggcttcacataaacaagtgaataggccccagagaaactcaagcctcctctcctttctagctcatttagaggggaaggaggagggtaggcctctgtgagcacttggagcctgtttggtacaggccaggctctgtttcctcagccagttgttgagacaaagaacactagagaaaaacaatttgtaaatgtgtataaaggttttattttcaaattattccacctgcctgtcttctaggcattttattttcatgcattatttcatttaaacttcacaacagccctatgaaatgagcactcttccttttccccatttatagaaggtacaaacctaggtttactgacttatctaaagtcacacactagtaagtgtcagaactcagatgtaaacttaggtctgctggattccagagcatgttcttaagtccctgtcctatgcgctctgtgataaagaactatgaagaccctgtttctgttctcaatgtcatttcagtctagcagacatgatgatgcctgagagctactgtggggaaggtaagtgagatgcactggctgctatgggagagctaaatatgcaattggagtaggcagagggaaggaagtgattgattctgatcacagaaggtacagtaaagtttcacaaaaaaggtagtaccttagcagaggccaggcatggtggctcatgcttataatcccagcactctgggatgccagagtgggaggagcacttcaggccaggtgtatgagaccctgtctctactttaaaaaaaaaaaaaaaaaagaaaagaaaaagaaaattagctaggcctggtggcacccaaccgtaatcccagctattcaggaggctgaggtgggaggatcactggagcccaggaattcaaggctgcagtgagctatgatcaaaccactgaactccagcctgagtgacagagcgagaccctgtctctaaacaaaaatgtaataccttagcatagttcagaagatgaagaggagttcccctcttcattacaagagtacaggagtaaaagtacaagagtaaaaggacattactctagtgagaatgaactgaaatgtgcaaaggcactagttggcttgccaaaacatacatagaaaaaagattttttgaaggtagtataatccagagcttcagcctgctgtgtgtcacccagcctttagagatggcctattaaatagggttgtctcaactttgggttgtcagtagatgaccatttcccaggagctgacagctgtgctgtaggacaaacagaccataatggcatggctggcattcttgagtaactttagtgagaggttttagggggtgtgttgggggtgtggggtcagggtcagacatagcttttttgaactcataccagctctgaagatgcaaaccgcttggttaagtaggggcatctagagcaagtggatggtccttttcatcattgacagaagtttggggcctctgttttgcatatggtatagcctcacctgaaaaataagaatcagggctggaggtgggccaggaaatggggaggaactgggggaatgttaattatgttaatgaggtaggatggaaggggatattggctggatcctgaagccatttggagactttgaagcctctggttcctgtgacatgcagggactcgcccagtgctactgagccttaaagttccctcagttcaaaaatacctccccaacattgcctacaaagtttctttcagccactctggcttgtcagatttaaatgaggtaccacatatagagcctggtctttaataagtgttcaggagatgttagctattatcagcatcatcttcgttgttctgcttcacggtctacaaattagagactgattggttctctaagttgttcatacctcagtgtgattaggttgaatgtttggaaacattcggcttttccaaggctctggggattttgaggcaactgcgttgtaaagtcttagaaagactgaattttgtaggtagacagaccctaattaaaatgcaggctttatgctagttttatgacccaaagtatgctgggacacctcactctgttcatcttaaaataaggttaatgacactgaccttggaatgaagattaatgaaataattaaaatagtgtatcaaaagcacatagccagtcctggcacatactagtgacttaatctcagtttccttccttttgtctgggtgccctgaggggcagtttgggttcacacagggaaaggcacaggcctgggaaaggacttctttcttgccaaacccaagcgctctctgcctctccgccgcctctccccacttaggcagagctgggcatgatcacctagactagtactcccacacacaggagtcacacttacacagcagcagcagcttgtgtttacttctcatggcctgagaatcattggctggttcttctgtcttccacactagactgtaggttgcttgtggcctaggcagtgattttctctccagttctctggtacctgaccaagtgtgtgctgtgctaggtactcagtagatgtccctacggatgtgtgtgggcagagacagttttggtgatgtatagccacttacctttgaaacctttcagaaaaaaagaacagattgtgagagtagatatgagaggagaacacttagaaaaagcttagcccccactctgttaaaggtggtaaagttagcatgatctcagcagaatggtcctttttttgctgagaatagtgcattctgaactcttcttggttcctcaagtgttaagtccaagtgtgtatttcaccctcatttgaagatccttcatctgttgcagaaaattgtctcagctctgcctcccacttcacttttctgtgccactcttcggctgtgaatgtctgcatgggtaccaccgatttgtgatgagcaggctgtatatcgcctctaagctggtggttccctgtgagcagtgttcttcactgctgtgtcacatgcagcagaacacaaacctgacagccacatcgtgtggtcattgatgtatgcaaaggagcagcaggaggttctccacctgggtctgggaaactccccccacaagggttttggatgtgtgtcacgaacctgaaactgtgtgggaaattgtgtgcatatgttcataaatatattcctcttgtgagagagtccatagtttacattagtttctgaaatattttcatgatccttaaaattttttttaaaaaaaaaaacaacaaaaaaccactcatttagaaattttccaaatatgtgtaaattacagtttgtgtttttgttagctaggagatatttttatgctcccttgatttccaggtgtgagctacaggttgggtagccagagagctctggatcacagtctgccgtgagcattgcttacacttagccctcagagttttcactgaatccttctgagcttcattttatttttcttctgttaatttaggtttataatgcccttttgtctacaggaatgttgcatagtaaagagatcacaggtgtgcaggtgttttatcaactgtcaagtgctgtacaattgtgtgatgcaagtattcctattaaaaatgtatcatgtctcagctgggcatggtggctcacgcctataatcccaacactttgggaggctgaggcgagtggatcacgaggtcaggagatcgagaccatcctggctaacacggtgaaaggccgtctctactacaaataaaaaaaattagctgggcgtggtggcaggcgcctgtaatcccagctactcgggaggctgaggcaggagaatggcgtgaacctgagaggcagagcttgcagtgagccgagatcacaccactgcactccagcctgggtgacagagcgagactctgtctcaaaaaaagaaaaagtgtcatgtctcatgtcacacagtattgaggacatggtaggcagtcaataaataagtgattaaaatgaacatggaaagggtttattgaagtgagagggctagaggttttaagacactggtgtctgtgtaccttgcagattctgtggagaacctagtattcaggcctagaacatagcttagggctattagaggaactgattttcaaggaatgttaaaagtagaaatgaccttcgagaccttaagtgtatttgttttattttatggaagacactgagacttagagagacagaggctatccgatttatttcacaagggcttgagactcttcctcatcacttttaatagtggccaaaaaaagaccctctttgccttcatattatcaacatgttgtcttacctttttaaaacagcacagaattcaccacatggtcttaattctctttttggggctactcacaggcctgttaattctggagtatactgatgctattactggacactggcacagtgcactgtaaaaacttggaatttctggagcccttccttcttggagtgttctcttagacatcatgtcagaccactaggtggaaagcattgccaccattcttaactgtactgagactcagagaggttactgtgacttgtccaagtcacagaactcagtgtccaaagcagaatgaaaattcaggtgttctaattttctattctcttaaccgttagattctaaatgttctcatcagaccccctccctgccgcnnnnnnnnnnnnnnnnnnnnnnnnnnnnnnnnnnnnnnnnnnnnnnnnnnnnnnnnnnnnnnnnnnnnnnnnnnnnnnnnnnnnnnnnnnnnnnnnnnnnnnnnnnnnnnnnnnnnnnnnnnnnnnnnnnnnnnnnnnnnnnnnnnnnnnnnnnnnnnnnnnnnnnnnnnnnnnnnnnnnnnnnnnnnnnnnnnnnnnnnnnnnnnnnnnnnnnnnnnnnnnnnnnnnnnnnnnnnnnnnnnnnnnnnnnnnnnnnnnnnnnnnnnnnnnnnnnnnnnnnnnnnnnnnnnnnnnnnnnnnnnnnnnnnnnnnnnnnnnnnnnnnnnnnnnnnnnnnnnnnnnnnnnnnnnnnnnnnnnnnnnnnnnnnnnnnnnnnnnnnnnnnnnnnnnnnnnnnnnnnnnnnnnnnnnnnnnnnnnnnnnnnnnnnnnnnnnnnnnnnnnnnnnnnnnnnnnnnnnnnnnnnnnnnnnnnnnnnnnnnnnnnnnnnnnnnnnnnnnnnnnnnnnnnnnnnnnnnnnnnnnnnnnnnnnnnnnnnnnnnnnnnnnnnnnnnnnnnnnnnnnnnnnnnnnnnnnnnnnnnnnnnnaacaaatgactgccttactaagtgaggtcatttgctaattaaatttcaaaacattttcagagttgttttttgtttttttgtttttttgttttttggtcaaatgaagtttctccccgacccccacccttaccatttcctataggccaaagcaaacatttttctgcatttgccaattacagattaaacatttaatcacttaaaaagaataagtgagaaaatggatgagttttgggaactgtccaggatgagttgtgggaactgtccagctacctactgtaaccatagctctctgctttcccacagataatgtgaggtgacctcttctccatcctgaaactatgtgctgctggacctacccaatagacgtaactgtcttgggggaaaaagacacattttttttaaacaccccatacttctttttcctcttcccctgcctcccccaacaccatgatgaaattctgctcaggctattctatttgtacagaaattgtatctgtatttctgttggcatattagaataaatgttggtgataacctctagggtgttagaaacattgctattgtagggccctgtccctctacttactgagccaacatggccatgtagccctaatggcctaattcttaccaagtaattcctttgtaaacacagattagttttgaaaacagtcaagaggccatctcttttcccctacagagtctaccgtcttctgaccttccctattcttgtgatctaagatatttctgtaagttgagttacctttttaattggatgaaaaatcatgaagtcttgagcgttctagtaaagaacttagttaagctggtacttagcatattggactttcctctcaatcaatctcctatctgtgaaggctttaaagtgcacagtttcagcaaaatggttatggcctttaagtttctgattgtttgtgaagttgagaggcctttagatgacctgcctttacaatgacctttctagaatctcaaaataacttgtccaggactttcactatttaagaactggcttttattcccgctctttgggtatgagtcagcccagagtcaaggatttggtgatttgaaggtccatctcttgttctcttaacagtaagttcagaccatgtactatgctattcgtagcactccccagtatggcctgacccacttctcagccttaacttctactgttattcatgaacctctgcgttattcaaacacatctacctagaccttgagtatttttagccttgctttataccactttgcccctggttgaaatggcttcagatctttcttggcctacttgaatcatgcttgctttcctgagttccatccttcttctgagtttctatagtcataatgtcaaggtcacttgcttctcacttttcctatactgtctcgtacttttggtcattttttcaaatgtacttttcctctggccaaccaaagtatgggctcttcaaagacaatggtgactgtcttattttttatggcacttatcatggtgcttttgcttatcataaatacccaataaatagttaacaagtaagttgttttttgctactacctgtttattgtcttattcccaagcctgtctacatttaatctccatgataaagaattatagatgctagcaatgtttttaaccaaagcaaagtcacctgtagaactagtgcagatacaaaacatcatttgggataaggagcagctcctgtctccccctaacccctggatgttccaggccatgctagatagaatgtaagtatatacaaagtcacagatgtggagatgactattgaatggtcttgtgtttttatttctccccaggtgtggtcactcacctgtctaccactcccgtgaaatggcagctcgtgccttggtcccatttgttatgatagatcacattcctaataccattcgaactctgttgtccacactccccagctgcactgaccagtgtttccggcaaaaccacattcatgggacacttctccaggtaagtaaagttgctttgtgtgacttctgtcaaacaccataagatgaactttggtttcttatgtactgttagctggtgaagatttgatacacagcctcttaactttatctgtagaacttttttttttctacttccgaaagatcaggtatctcctagttatacttttttcatcccaaatatcactacagtgttacattgtgattctcttatattatcttttgcaatacatcctgtgttttctgcagtatactttctcccacttggcctcacctctctgaaccagataaaactttgtcttttccatcaagtatgcctgcaaaacattctgggctactacctattccgagtgaaactgaaagcattccttgagagaggttagcctgagaggcacaggaagagctgtacacatcagggagagtttgccctgtggcacagcaccttagtacgtggaagtattgaacctttcctgttttctctgtgctaccaaaaaaaacttattactttgaataaatgtacaagtttattgtttttaacctaacatttcttctagaaaagaataacatacaaaaaataaatgagaaagagactttttactgaaactgccctatttcaaccctaacttgaggacaggtagtattggtgaggtctcctgttcaaatggctgctatagtgctcatataggcatgcggttaggggtggaaaataaatgtcaggtcatgttcctggtttatgaacagagttgagagatggccttgagatctcaatacatgttataagcctgagatcgacactgctgacatggcaggcagtgtgtggagtgattaacaaggtgaaactctggagccagactgcctgggtgtgaatctcagatctaccccgcattacttatacatccatgtcttcatttttgaaataaggataatagtagcatatacctcatagggactttgtgaaccctaaggaaattaatacatacaacatgcttagaatagtgccgggtacaccacaagatatatagacagtcattattgttattattatcattaattttaataaacctatactataatgaaaactgattatttcataactaattccccctaggtaataagaatgcaagatagaactatctttttcttttttctttcttctttttttttgagacagggtcttacactgtttcccaggcaggagtgcagtggtgcagtctcggctcactgcaaactccgcctcctgcgttcaagccattctcgtgcctcagcctcccgagaagctgggattacaagcagccctgcacccccctgtccccacagtcactaatttttgtatttttagtagagatggggtttcatcatgttggccaagctggtctcgaactcctgacctcaagtgatccgcccacctcagcctcccaaagtgctgggattatggacatgagtcactgtgcctggccgttccttggttgttttctatattcaacaaatgcctactacatttcactgtgtcacagtcgcaatagcagctaagtcagtttttgccttgaaggagccaaggacaaaaaaggaccagaaaataggcagtcatgatgtagtgtgctaagtgctggctgaacacatagcagggccaccagacttgtctaggaaatcggggaaaatgtcccagaggaagtgacctctaagcagagactgaagaagttagccaagtaaagaaagggaaggagtctcccatgcaaagagagcaacataaaggctcccagtgggtagcccccaagtgggaactgctggtttgggtgggactgaagttctaggttggcagttttcaaatttgtctcaggacctctttacactcttaaaaggggttgcggctccccagagagttttgtctatcaatattcagttagaaagtaaacttgagacaggctggtgtgggggctcatgcctataatcccagcactttgggaggctgagctggacagatcacttgaggccaggagttcaagaccagcctggccaacatggcgaaactccatctccactaaaattacataaattaactgtgtgtggtggtgcacgcctgtagtcccagctactcaacttggaaggctgaggcacgagaattgcttgaaccccagaggcagaggttgcagtgagccaagattcatgccactgccctccagcctgggcagcagagtgagactctgtctcaaaaaagaaaaaagtaaacttgagaaaatattaaaacacgaggacttccaagcacatattgcattagttatcaatataatgatatcatcacacaccttgtagcctctggcaaactccactgtacactcatgagagaatgagagtaaaagaggaaactattttcttggcatcacttgaaaataatttgtcttgtggacctcttgaaaagattgcacagccccagactgcagtttcagataatctagtctgtgttacatacattatgggtcttaggtggtttctttaatataaactcttgagcactcatctcccttgagtttccactacatccctgtgattaggagagggacaggggttattgtcttggtcttaaagatggaccattgtggctcaaaaattatcatttgctctgcctcaaaatttacatctcttgattgtgtcagactctgctgcttcttcaaaagagcagggctggaatgatgaggaatatagaacagccttttcaaagtgtgaactgtatctgagttagaaggaaggcctagcttgtcaaggggatcagccatcagattttctttactgaagatccactcttggctgaactttatccaagtagtttggttggagttgcttcttgggctctctcaccagttgtgcaaatgagcctcccagccttgtttcccacacgtgctactggcaggtctggctgggtttcaccagtctgcccagcaacaaaacatggtcttttgctctgtgtctgggctacttttgatagtctcaagtttacttcttctgctagataaaatgtgaaatcctgtggaaaggttaaaaccctagaaccctggggttgttgtggctgttgctcttgttcctaagtgttggtgggatgaagggcttgttgaataaaagccagcaaatgtggttgttgggtatcatattcatgtttgtcagacagattcctacctttatcaaggttggtttaccctggttgagaaaaagaagtcaaagggatgtggaaagtctttctggcatgtccatttgggtgtcacacctgtgttgtcctagttctgtccatcctgtggttctttatggggaaagcataaagggttaagttgggaagggctctttctttttcctttctacagcttatagattcctctccacataaagctacctttgaaatcattaaaaagcctgcacctggaaaagaggtgttagggattgaaaggaatggtcatctccatgggacctccagagccagctaaataaatataaagttgttatttttttcaaaagcaggaaatcatttcataatcagaaaacaaattctttcacagaacattttcttgaattatacattttgactgctttgaaaatgtttacataaatatatcaaatctcagagtatttctatagtataccttgaaaacaagaaatatgctgatctctgaattttctgggactatggaagaaagactcaaattatagcacatgcaaaaaagaacatgtgggattcatttcttaatcgttttaaaaaccagaggttcataattgctgtgttgagatggttataagtaacacacattagaaaaggtgaggttatgcggcagattcatgagagccaggggtaaatgacattaaatctcaataaaggctagataagagccatggacattacctcatttgggaacatcactagcagggctgctctgtcttttaagtagatttaaccttctgtttttgttgccagaactcttcatgttggggacttaacattattactaggttacttatcactctcaagaaatcatattggagttcagaaaatcttatattgaggaggagcttggccaccaatcatgaggaagggtttattctgattcttgggtacttaactcacattttgggtgattcataagaaaatgtataccatttgaaataagagtttgaattttcagttttttcatttcttgtctattttgggtcttttgttgttgttgttgttgttatgtacaaataaaaggtgatctgttgctcttaatttagctcttttttttttttttttaagacggagtctcgctctgtcgcctaggctggaatgcagtggcaccatcttggctcactgcaacctctgccttctgggtttaagcaattctcctgccttagcctcccgagtagcttggattacaggcgcctgccaccacggctggccaatttttgtatttttagtagagactgggtttcaccatgttggccagactggtcttgaactcctgacttcaagtgatccccccaacctcggcctcccaaagtgttgggattacaggcgtgagccaccgcacccggctgagataacatattaaactctaaagcctgtgttcctattttctttagaatgtgctgcctctgatgtgaataacagctttttatggctaaggaaaataaaccaaggatccatctaaagatatactttatcactcagttgctctccttaaatctaattgggtatgttatgatacagtggaaacaaagtaaatctatttgtgttattgagacagaagaagtcagtgaaacccagggaagctgcgacccgtgaaaggtatattgtaccctcccctctctactcatctctctgtcatcatttctctttggtcttccatttaatgctactaaatctgtatctggaaatacagatcctcccttgggacctaggctatagccaagtccatagttgccccaccttctgtcatccttaagggtttgacaaaacctctcaaacttgggtaaccataggagttatggatcctagatctaggaactgataggaccatgagaaggtggtcaagactgaatttaattcagcagacactgtagcttgcttaccctgtcctaggcactggtgaaaacacaaggagtttgcctttgatgcaaacttaaagagagctgtggattagaagccaagtgagccctcggggaccagggatcatatgagtaacagaaatgaagaggagacagaagatacaatgccagacagggcatcaggcataaaaggagactgaaactgaggccatttctgcttgagtctggagcaccccaatagattctgtgtttactgtagagccagaatctttacgtgatgggaacagtagtgttgggctggatgggacacatgaagaccgaaactggagtagactttagcattacctttacgggaagaaaaccagaaaacaaagaaagaagtaaaggtaggctagttcggccagctagttgtatgaaggaatcactgtgcaagaagcagggatggaaccaaccatccttcactctattctacagacaggagcagtggaagcaagtagaaaatcagtgatagaggtaaccttaagtgtcaactctactggagtttcttaaataaggaagcaaatgaacatttatagaaaagatatgtatatatatttctgttaatattactgttacatcaaaacttgtgattaaatataaaagaattatttccatcttttaaaaatgtaaccatatgagtcaatgtcttagtgctttaagaattttaatgtcatttatatttcttaaaactacaaaattgtgaaacataaaacggtccagctgtccagaaatggaacatttcttgatagattccatttggcgacctaagatgttggccgtctccattgttgtttgttttatgcctcgaaaatattatttcagaatggaaaatcaaaaacaaaagcatgaaactatgctgatgctgtaagttataaatggatttctggtctgtgtgctttttttctggaatgagtcataatttaaagaaaatgctcactcttgtcaggtggccagatttattctttctttttgaagacttgtgttagtgtgaaaggagaaaaatcttaagttgctagaaaggtccctagtccaagaagggttaaggcagagtttctccagtggcgtggctatggatgtgccaaggtatttattgattccttcagctctcagggagtcttgagtgtggcctggcagggctggagcctctaggcagtcacctgcagctgggagcagcatcgttggttttatcccagagtgccaaagaaagattactttctatgtgtgccttgatgtgaaaaggattgggaagcattgggctcttaaaaaaaaaactaaagaaaggactaaaccttgttaaatcttaccttttggcaatatattcctttctggatataagcccaaaaaagtcatttttaattaaaatgctacttttgaagatgaattaatcccttccttataaacatccaaaagcttttatttggtgtctgttacttagggagcttttgctgggtgttggagacagcttttagctgccaggttctggagcattgactgtactgcactgtgtggttgttccccaagcaatgtactgctgttttgaagtgctcagaactcagagtatcagtcaggggcaagtgaaacttagagatttgccatttgatgtgtcctcaggtgtttgtaactgttcaggatcagagtaggggaattaatagcaaaaagaggaaaaatatatatttttttcagtgagagatagagtgtgtgtgtatgtgatgtatgtgtgtgagtgtgatgtaccagtcactgagttcctacagagcctcttctggaggataggtgttattcccatcctactggtgagaaaactgaaaacaagaggggttgtgcgatttcactaaagttatgcaagattaaatggtaaaaagcaaaactgagattcaagcccaggatcgtttgaagcttttgagcttgtgcagttagccactgtagtatactgcttctctggatgaggaaaaggaatattgtcaggggagaaggattctatctggggccttcgggttgtgggtaaaatgggatttgatgtcatctatttattcattcgacaactgctaattgaacaccagctacgtgccaggcactgttctgggtgcttggactatatcagagaacagaagagacacatccttgccctccaagattactgctctcagtgtacttatattccagcagcagggagacagtaagaaatgttcaagaaataaacattcaataaaacatatcagaacttattatagtaaatataataggtaaattagatagtttgttagaaggtaatcgttgctgcggacaaaggaacaagtagagtaggctaaggggaatcaggaatagataggagaggagggcagttggcatgtcagaatagtcgtcattggaaacgtttgagcaaaattctatcacaagacatgggaaaactttcttattttttgaataaaggtaaagggtagacatattttcttctgaaactgtgctggctgcagacatttgtaagcaggtataccaactgcatgtttgagactatctttacccataggaaagtgccaacagagtgggcagtagtggataaacaaggccaggaaggatgccattactttagaaacttaagagctccctaaagcgaggtggtcatactatagatgccaggactgctggggactctgaaacccttttcttctggaatcaccgtgaataccgtcagtctgtcatggttctgatgagcttaggcaaagagcaaagtatccatcatattacttcctctgctttctggtatgacctttaccttaaccctctggacctgggccttagagatgtagagtaaatgtggagaatgtttattcttctgcttagcaaatatttattgagaagttaagtacatactatgtcaggtactgtggaggatacaaagaaaatttatagcatattctctgctctcaagaagcttatgagctacctggaaaataaaccattgacactgcagacaattacacagaaatacgtggctacatgttatgtgcaccaagcatgtggccgagatcacacatctgagaggcaagaccaggatggactggagacatgagagaaggcttcaggggaacattgggccttgggataaaccttgaaactagctttctgtttttgaggcaagggacatggtatgagcccaggcatggaggagggcatcagaaagtgtttgcaggaggcagtgagcagaccagcctgttgtgtcaaggagagaggatgtgtgaatggcagggtgggtgcaggtcagcatgtgagagaccacaaatgccgggccaagcagtttgggctctgtaggcctgtagccttcaaagtggggtttgcaagacaataatatatgtggaagaatacgttagtgtgttatttcttttatcgcatcctgttttattattattatggttattgttagagactagggtatcgctatggtgcataggctggccttgagctcctaggctcaagtggtccccctgcctcagcctccagagtagatgggactacaggtgtacctggcttttagctattattttacatttgatatgtaatgtacataatgtattaatagaataatatataatttctaagttaataagtacacaaaagctgggagcatgtgctcagaaaggtcctttcaggtagtaggtaagagtggactctggagccagcttgtctccctctggatcctagctctgctgcttactagctgtgttattttgggtgagttacttaatttctgtgcctccacttcttctgtaaatgggaaaataaaatgacctcatagggtggctgcgaagattaaatgagttaatatgcgggaagtgggtagcaaggtctctggtatatagtaaatgctcagtaaatgttagttgctattattaatacttgctgctactgccaccaccactgctacgggcggggggtgagggggttatgattaaaaatgtaagaatcactggtgtagatggtgagtaaaagaccttgagctaaagaaaaatgtgtttaaaaaaattaatgttgtacattgaaataatactgtaaaacatgaggattcctattgatgtgtgagtgcatgagacaaataagtccattttcagcaattttgactttatgtgttatcatatttcacagagaggttcctccggtcagtcactgtgttctctgccttcctgtagatcatgttaaagattataagagctgagattagctcaaatttttaagggcagagttcttgcctatcaggttgttattccttgcacctgttttgttttgaattacatcctctccctcagatcccactggaaacttgaggaatcagtgtctcacactgtctgagacaaaggactcttttatcatgggaagggagaaatttgaagttcataaagtgaaaggagatacaggatcctcctagatagattaatctagcacattccaagtttttttttcatcttggaagatatgctttccatcccctgcgagccattccactcttactgtctgagacttcatatgactgacgataattctgaatatactttaaaaattatgcaacacaacaaaacatctcaccgtgggtacactgtcaggcttttgtcatttcctagaatccctgtaaaatatctgatggtatgtggtcccataatgtgaagggatttgtttggtggttcccaaccaataaaaatagtattatttgttgttatttgtttttagtatatgcaaatggaataggccaaaagtaagacctttgtttttattgggatagcatatttgagattgcacgtttatgtacttgtgctatagctcttagatatatttatggcacccaacgtatttgagttactaaggacacagctgaccatttaaaagcactgtggttgagtatagccaatttggcagccaccccagatgcctgaagtaaaattgacacacaggcttaaaggaaagtttaaataagtaataaaactcttttcctattttagaccatattgttgttcatgacattcttgcatttctctgtattgctacccacttcaccctttgcttttgtggcagggcttctcagcctcggcactcttgacattctttgttgtgggtgtgtgcgttgtgcaatgtggtgtgtttggtagcacccctccttcatttgtgacaacaacaaccaaaaatgtctctagacatttccctatgtcccctagggaggcagggggcggaggcgggggcaaaattgcccctagttgagaacctttgttccatggtacctatggattttccccatcatcctgtgggacaaggtgtgatacagctcttaaataccagcaaccaccaaagaaaccattcctgacccgggcagaagttgtggctcagcatactacagtgagctgtgcataggcattaatgaaaaggtagggggatacaaaactcagactggagtcactaaggaggcactttccttcctctctttctgtctttctactggaaaagtgttatgaacatataagccagctcacttttaaaatcctagcttcttatagcttgcttcatgtccttgttccaacctgcctctcatccactttcataatgtatagttgaaactgaattctgccctcctcagagtcagagagcataacattctagtttctgtttacctaaggaagcttcggaaaatgacacataattaaaattttctcacttctttacttgaaacactgatgaattgctaggtacagttgctgtctgtttcattgatcctctcttgggtgggggacaagaggctgtgtgaatgaatcttctctaaaaacagaggttctactgaaaacttaacccagaacataaaaatgttttctttgagttaagcataaagctttgtccatattcccagattcagacctcagaaaggaaactcgtggataaatctaacgggtactgaacatacatgacggagatagtaattatgctttttttttttttttttgagaggaaatctcactctgtagcccaggcgagagtgcagtggcatgctctcggctcactgcaacctctgcctcccgggttcaagcaaattctcctgcctcagcctcccgagtagctggaattacaggcacgcgccactggcacctggctaattttttgtatgttttagtagagatggggtttcaccatgttggccaggctggtcttgaacccccaacctcaggtaatctacccgtctcagcctcctaaagtgctaggattacaggcgtgagccactgtgcccagcccgtaattatgttaatattattttttaaaggaccttaaatattatacatgcctcatatatgtaaatgtctagaaagtcagtagtaaatctgtcacttgactctcaaagtagtatgatgcatacaaataagacctttaaaagcatatccttattattgcttttagaaattgtcaaataattcttatacatgtttttctttgtctatttggggaaaaaaaggaaaactacatctattatattaaaatgaaggctctctgttttggacaaaggcatatgtttgaaaaaaaaaacataagttaaatcttacttgaatttctcttgttactgtcaatagcatgcatattttgtgccttttctacatcaagtgaatgggattattaattgaggtatgaatttgtacttgcaaatgttcacctttttggccaattgttgccttcctgcttcatcctccactttttttttccttattaattagtgggttgtgtgttatagtcttgaactggtaccactctgaagcagttgttgaggtatgtatgggcatcagatatcagatgttttactgatgggcccatgttcatatggaataggtatttagaatcttggtcattttcctatttgggatgcctttttaatctttataaagtaaaatttctggtgagggggacatttttcattagcttcctgagaatcatatttctaaaaaggtctaagattatttgtttggagttttttttttttaatatcaaatggatttaagaggttttttaaaagttgtgatttcgaagagtttacaagtgccagcaaattctatcacctttgttaatcttcaaagagatcagtataattaacatcttacatgtgctgtttgacacttttttcttattaacttcttaagcctttaaaaaaatctttagacagatgagttttacatgtaaattttagtccatttatagcagatagactttatgcttgccccttcttctttttttttttttttttttttttgagacggagtctcgctctgttgcccaggctggagtgcagtggcttgatctccgctcacggcaagctccgccttccgggttcacgccattctcctgcctcagacttccgagtaactgggactgcaggcatccgccaccacacccggctaatttttttgtatttttagtagagacggggtttcaccatgttagccaggatggtctcgatctcctgacctcgtgatccgcctgcctcggcctcccaaagtgctgggattacaggcatgagccaccgcacccagcttgccctttcttcttagattacaggatgtatagtcatttttatatctaacttgtttctgaaatgcagtttcagtttcctgctttataactgattttttcaaatatgtgagacatttacttgtccaattaccaaattgttttttgtttttttgtgggtttttttgtttttgttttttgtgttttttgagacagagtctcactttgtcgcccgggctagagagcagtagtgagatgttggctcactgcaaactctgcctcccaggttcaagcgattctcctgcctcaacctcccaaatagcagggactacaggcgtgcaccaccacacctggctaatttttgtatttttagtagagatggtgtttcaccatgttagcccggcttatctagaactcctgacctcaggtgatctgcatgtcttcggcctcccaaagtgctggaattacaggcgtgagccactgcacctggcctccaaattgttttttaagtttgtttatttagttatttattttaatttaattttttgtagagatagagtcacactatgttgcctaggctggtcttgaactcttgggctgaagcaattctcccgcctcagcctcccaaagtgctgggattacaggcatgttccactgcatccagccccaaatttttcttatactgaaaagaagtatgcattgatcagattgagagaaaattgaaatagtcatcaggtctgatttttagatgtgcatatagagaacagagatacaaggcagtaatttattaaaattcatgattgagcgtacaaatatgtgtgttcagtatgtacatttaggaagaacatgctagaaatttgagttgatgttcttcaaaggaaactcttagagtaaattagaaatgtaattacaatccacacccaccaactcaaaagggtactgagttgggtaggtttctgaagaaaatgaataccagtgtaccctagcctgtaatccccaagcagtggtaagctcttactcacacccctcgcccctccccaagagctcaacagcctcattagagaaggaggactatattgttcagtaaatgtgtcttgaagatcatcacttcttctattctggaaaaatgtgtgatttactttgttactctccccttgtcctagcttttcctcctttgttgtttctctaaatttttacttctccctcccgaatgagagcatgagtagaggtgcataattttcagttgtctgtccatttcagaagttaactcttactatcactgcactgatcatagtaagtttggtcattttaaaattcatatagagaagctggggtaggggggtagcctgtgtgtgtatgttagaccaggagtgatggtagaagcctaaaaacatctaaaatttcagttaataaaagaaacaaaataccaccaaaaagtctgcccaagaatttatgttcaagtgaatatgttttggtatttttgtataaatttaagaattgacaacgtttttcactttttttaatgattgacctttcacagatgcaataggttgctgtggagtgttagtaagcactcatttcctgaggtcaggcacagtttagagaaccttgtcactcaaagtgtggttctggaccacagaatcagcattgcttagaactggttagaaatgcagaatcttgggccacctcaaccctcttgaattagaatctgcattttcacaagatccccagttaaactcctatgttcattatgtttaagtactaattcagatgaacgtttttcaggatgctgtactggggctcccagctagtagctagatggttggaccagctgaacctaacattcggtgattggttatgcctttgtttccatgaccaacagggagatgggtgtgatgctaattatctggtatgttagcttaaactgctgatgagaacccttaatactgtaactcatatatagctttgtgttctagctgtcacgtaattctttattttaccaagaagatggtgaactcatggacggcagggattgtgccttacttatgcactgtctccaaaacacctattactaagcatatagtgagcctaggttgattggtttgattcgcttttccaacaaccaattttgatactgtcaatcatctctgtgtggttagatgcatcttttattaatattatttcttctttttcaaaatgtacatttagagccatacatgctcatttaatgccattttagtcccatcccataagtgttcatacatggtgctttctttgttgtccacttttaaatatctgaacattttcataatttattctttaacccattgattattttttgaaattaaaacattgatattgagattttattgttaaattttcttaaaatgttattttgtggtcagagaacataatttataattatattccttctttgagaattttttgaggccatttttgtggtatagtaatgtggtagtttgtaaattgtgtgcttggaagactgtgttgtgttacttaaatcttctaaactcttaactgatttttaaaacctgcttaatctgtcactttataagcagtgtgtcaaaagctcctatatgtgaatttgtcttatttcttctttaattctatacattttagtgcagcagttagaagcagtatccatgaagtggctagaatctttatgattgttatgcttttcaggagaattgttccttttatcgttaagtattttcctcttttataactgttaatgccttttggcttaaattctaattttgtctggtattgacatggtgacaccaactctcttttgcttggtatttcttgaatatcttttttatcttttatgttcattctttgtctctccaagttttagttgtctctcataaagaacatatatctgattttgtttcagtatgcaatctgatagtcactgtctcattttaaataaacttcttacttaagaatagttttatatatactgaaaagttactaagatagtacagaaagtttctgtacacccctcacctagtttctcctattgttactatcttacgttagtatgcaacatttgtcatggctaaggaagaaattggtacattactgttaacgccacacgttttattcagatttcacaagttttcacctactgtcttttttctgttccaggatcccatccaggttaccacattacatttagatgtcgtatctccttagactcttctggtctgtgacagtttctcctgctttttttcatgtttttgatggtgttaacagttttgagaactactggtcagatattttgtagaaagttcctcaatttgggcttatctgtttgttcttttttaatggttggactaggattatgggtttttgggagaaagaccactgaggtgatttgccattctcatcatgtcgtatccagggtacatgctatcacatgctatcaatatgacttatcactggctgggcacagtggctcatgtcataatcccagcactttgggaggccgaggcaggcagatcacttgaggtcaggagtttgagaccagcatggccaacggggccatggtgaaaccccgtctccactaaaaatgcaaaaattagctgggcgtggtggcacacacctgtaatctcagccactcaggaggctgacagaagaatcgcttgaatccaggaggtggaggttccagtgagccaagatgatgccactgcaatccagcctgggggacagagtgagactccgtcggaaaaaaaaaaaaaaagacttatcactgttgatgttaacattaatcacatggcttagaagtcgtgtttgccaggtttctccactatagagcttctctcctcttctgtcttttttccatactctactctttggaatcaaatcactaagtgtagcccacactcaggggcttgggagaaggaagttgagcttcacctcctgaggctgggtggggggagtattgacattacttattttgaattcttctgtgtgggaaatttgtctcttctctcccatttatttatttgttcaatcatttatttcaatcagtatggactcacagatatttattttgtacttcgggttataatccagtattacattatttattttgttgctccagttgtttcagcttcagttttagctattgggagctctttcaggttggctcctgggtgcctttgacatgccttcatcctttcagtttgtttgtttttcttccttttttttttttttttttttttttgacaaagtctcgctctgtctcgcccgggctggagtgtagtggcacgatcttggctcactgcagcctctgcctcccaggttcaagtgattcttctgtcttagcctcctgagtagctgggactataggcatgtgccaccatacccagctaattttgtatttttcgtagagacggggtttcagcatgttggccaggctggtctcgaactcctaacctcaggtgatccacccacctcagcctcccaaagtgctgggattacaggcgtgagccaccgcatccagccatttttcttcctttctggaacaagatgttctagtctcaccttggatgttcccttttctaggtnnnnnnnnnnnnnnnnnnnnnnnnnnnnnnnnnnnnnnnnnnnnnnnnnnnnnnnnnnnnnnnnnnnnnnnnnnnnnnnnnnnnnnnnnnnnnnnnnnnnnnnnnnnnnnnnnnnnnnnnnnnnnncacacatgtctatttctgtttctgtccttctgcaactgtatttaagctaaacaagagttcatactgacgtctttgactctactccagtattatgtggttcattttagctttctcccttgcatatctgtaaactttgtccaacagtgagaaacctagctcctgtcatctactactcatttatttatttcctcaatcccagtatagttgcacagatgtttcagaatttttaacccatactagtgggagaaaaaaaccttacctactagaatactgtatatacatttcttttgtctttagtcttacggtttctagtcagaacatcattttccaaagttatctgtagagtacagttagattctttcaccacagttgggttcttttgtcctgatctcctggttgattttttaaacatttgcgtacattaaactttagtctttgcactataaagttctgtgcattttgactagtatgtagaatccagtacccaccactataatatcatatagattagttccacaccctaaaaactttcctgtggttcccctaagcattcctatctccacaaaactctggcaaccactgatttttccatccagtggttttgccctttctagaatgtcatgtgactgaaatcacaaaatatgtgtaactttttcattctggcttctttcagttagcaaaatacatttaatattcatccatattgaagccacagcttctttttattgctgaatactgtttcattttatggatataccaagtttgtttaccctgttcacctgttgaaggacatcttgattgtttccactttggggcagttatgaacaaaggtactatacatatttgtaagttggtttttatgtgaacataagtttttaaagcagttgggtaagtacctagcggattgctgggtcatgtggtaagtctgtgtttaactttttaagaaactggctatcttccaaaatggctttaccattttgcattcccaccagcagtgaatgagagttcctgttgctctcagtccttgtcagcacttggagtcaccagcttgttgggttttagctgttctagtaagtgtgtagtattacagtagctcattgtggtttttatagttcttgtcttttagtaggctatcttaatccatttacattaattatgattcctgatgtcattgaacttttttggttctattatttcacattttctatttatcacatttctctttgcttcttgttttctttccttttacaattgtattaaatagttgtgtgtttttttaactcgctcttcatttttaccttattctgttggaagttatagactccatctctatctttttaagaggttgtccataaaatcttaaagatattatccttattttctcctctccagaagatacggacattagaatactgtaactgagtttgcttttcctgtcttccacattattattgtctactggacctaccttagttttaatccgtcattatttttattattttacactcagtatttatgcttgctaacatatttaaccaatttctctgttcattattttttcttgcatcccactcctttcttctgattttgatttctgtcttactcaatttctgtcttatcctccagttgaggttgtccaggttgacacttacttccttcagcactttgaagatattattaggctggtgcgatggctcacgtctgcaatcccagcactttgggaggccagggcaggtggatcacctgaggtcaggagtttgagaccagcctggccaacatagagaaaccccgtctctaataaaaatacaaaaattagccaggcatggtgttgggtgcctgtaatcccagctattcaggaggctgaggcaggaaaatcgcttgaaccctggaagtggaggttgcagtgagcccagatcatgccactgcactccagcctgggcaacaaagcaagactccatctcaaaaagaaaaaagaagatactattatattgtctatgacatctgttattataataagacagctatcatcagtttgattgtcattcctttgtagattatctagtttttgtggcatttaagatttttctgttattgatggcttacagttttattatgatgttcctaggtgatcattagttatattaactatactcaagacttggtgaagtcctttaatatgaactaatatctttattaaattccagaatattctttatctccgtttctttgaatattgccatttcacagttctgtccaatttttatctctgggcttgattcttgattatttcctcagatgtattttctagttcactgattccattttcagttgcttatgtctagtgacacaggtgaaataagtacttcattctgtcatggaattttctacttcaatgaaggtgtctcttccccatcccaccctgagatctgcctcttattttctcatggtaattatgtttacttctgtcttttagtcttttcattatctctttgattgttttctattaattttttcttaaatgcccaacatcacctctgcaatattttctccaaaatctatgacctcagtctaatcatgtgaaaatactatacaaacccaaattgagggacattctacaaggtatctgtttaccttagtctttttcaagttactggttttctgtagttcctggaatgtgaattctgccttttgcggtgtctggtgcctttcccaagggttgtaattcttttttagctcatcttcaggaacagtttttcctggcagtcccctgtgcactggatggtagaggcagttgtctctggtagttttgtgtttaaccttttagggccctttctatagatttcataggtcaagacccagcattatgtaaatttcttgttcctatactgcataagcctctctcaaacctgaaattttgattgctcataaggaacaaatttttcacctctggccgcaaggtaactagattctttgccatatccccgatcagatgatggagctttctagtgagtagaacagtttttcatcgctgtaagctttgcacagtgctctcagctcagcatctaattcccctgtgggtcactgcacctcatctatcaccctggctctaagttccttctttatatctggcatttggagattccctttcttgccattgagcttggtatatttaacacattttttccttaaaaaaaaaatctatgtctaaagaggagggggaaacatcatatgtcacctcagtcaagcattgactgaattttcaaatcccttgttgtgaattagttatcaggttgatcccccttccaggcctgtggtaatggcacatataagagcatattaattattcaagtaggaaaggaccgttatctaaactctaaacaattctaaacaatttataattttgccaaaggcatttgcagactcctccacaggtagctcagaggagatgctattgtttatcccaactccccacagccgccttctctttccacgatattgtgccactcccggggctatgttctgcccaagaataggtcgtgttgagtcatagaattttaaacctgtgggtggcctgtgagccgtgtactccatgaatgggaaaacagacctgaggaggtgacctgaattttttgaggctgaggaccgtgccttactcaccacttaaaactcccagtgtctgacactggctccagcacatagtaggggctcttgaaatgttggctgcatatgaagtcacacagtcatttaggagccagaccccatgaatcttaattccctggacaaactcattctaggccaccctactttctagtcatctcacataaagaaacagattttgtttgcctcagagtagtgatgggtagagataagtgtgttgtaatgtatctaggttgccagagcctctgcgaagcccttctgaatgtcagtcattactgacatttgacttaattcgagtgtggtatttggggctcagaaacctagtaagagtctttgctgttgattccaagcaggtgttaagtgttttgcttctaagtgagacagaaataggcttcattcatttaacatgtggccttcagtaactgagacggaatgtttagaatacagatctttatcgttgtctgagggcatcctagtaaatctctaacatcacatgtagtttgggaaagggacattgcttctgtgtattttcagctatagaattaaagaaagttttgaaaatgacttaagccaaatggagaccattttttgaagagcagatggttctctgttttaaaaatgttggctcaattgtcttaggtgtttgtagaaaacaaataatcataaagagggtattacttcaggagtgcatacagcagagtgtccttgtgtcttgactgtctgaatgtagtaagacaggggaagccatgtacattctgaactgtatctttatatacacctaataaaatagaagagagcattactggttatgtgtagaatccttggagaggccagagaggagggatgttctgttttctacaggtacaactttaaccatgctgtaaatattggctctgagggtttcacaatgtttatctggcttcaggggccccttttagtctgaaacagcttgcaggtgggtggtgtttcttgtgttgggttgtgaacactgacactgatttcacgaaattctcttgcaaaatgcttttgcatgtttgtgctttgttttattccttttcttggagaccttcatagtgcaggccctgggctgattttcctttgctgtcttaacactgtcagcagttctgtaacaagattaaagggatacctcagttttcaaaaatagaagttcaggaggtttactgcccagcagaggaaagtcagaataaccagcgttatattcttttggcctacagatttttcagtttcctaaaattgtgaccttgtatttagaaaaagaaaacatttacaaaattttcctctgtgtaaaattattttgaagtgcatgctagcttcactttaacgctactcttttggaaagaattttgtgtaaggtgcattcatcttagatgtcatccagtaattgaaaagctaagaagctacaatgatgaagtataaatcagacagggaccccaagtatacttatcattttaaaattaagaagaatagagagaaaatactgtgttatattatacttacttcattcctacttggtatacagtttgtgatcttgcagtgtttattgctccattgatagtttcattgacaaactggattatgtggtggctagaggatgatataatagaaagaagttttggatccaggcagacagtcctggacttgatattctctttccccattttctagatacttgctagggcaagtcacttaaactctgaactgaagcttacccatctgcaaaataataacgcataattggcaacgatgctgtaaggaatagagatgttacatgtacaaattcccagtatagtggctggcatgatatagtttcttaataaatggtaactatcatttgcatagtttttctggttttttttttctttttggtccacgaccatttattagaaaataaatcttacctccccagactgaaagctgtctttgtcatacactgagtttcagtatatagttgctcttattttccagatttttggtcttttcctttgaacaatttgtttattcatacaccagttgctcatagtagctttacaatatgtgttttacaatttggtgtagactaattccccttcagtattattttttcaatattttatgaactttaaatcaatttgtatagtcgcctaccttttattgtcatttttaaaattaggatcacactaaactaatatgttaacttattaactatatataacatatttaattatgtgttatttagtggtttatgccattccatttgtttgtatccttatatgtcatcaacagcattacattttaaaggttccttcgtatagaatgcattttaaaaatatttcttattgctgttatcagtgggtacttttattggttatatcttttgatagtgctattttacttttgaaaatgattgacttctgtatatttgctttgtaataatactattagtcctcacttctattgcactaactctgggtcaaacacttagatgcacttacatatatttgctgattgaatcctcataacggttctagaaagtgaatactattttacagtgaagaaactgaggctcatatagctagaaagtggcagatccagagttcagaacctgtattcctaacttcagtaccatactgtaccgtgtcacctaactctcatttgctgtattatttgtaaagatcttttgtgcactaatatgttttccgttgattctcttgggctttccccaagaatattacatgtttttgattgggctgaatattataaagatgtcagttttctccaaacataggcttaatgcatgtccaataaaaattttaactttttaaactttcacttgatagtgtaattccaaaattccaaaattgatgtgcaacaataaatagtaaggatcaatgaaatgttttttgattgagattgtgttgcatctgtcaagcaatttggggaaaactgacattgttaaagtataatttcataaaggtaaaatcactctcaggcaaatataaaatgaacatgcatgtaagattttatttaactcattaattaataagggaactagaaagatgttgtgatcaatacaaagaacatctgttggtaatattagaaatgagttttcctggtgtattccaatagagagtttaaatacttattagacttgggcaggctcattggctcatgcctgtaatcctagcactttgggaggccgaggtggacagatcacatgaggccaaggagttcgagaccagcctggccaacatggtgaaaccccatctctactaaaaatacaaaaattagccaggcctgatggtgtgcacctgtaatcccagctacttgggaggctgaggtaggagaatcgcttgaacccgggaggtggaggttgcagtgagccaaaatcgtgccactgtactccaagcctgggagacagagtgagaccctgtctcaaaaaaaaaaaagttaacaactgagatttattacaagctattaatttttttccttaagagaacctagtcatgtactaacacaaattattttagacagaaaatagaaattattggatgccaataataacttgcatcaagagaataagcagttctagtagtcttttaaagttgacagttttcatagagatagtgaaaatgttgggctttttgttttaattcttgaacatcatttatgatttaaactgtgtgttatatattgtattttaaataaacatgtaaacttgtcattattttgtacactcccctaacatttaaccttaaacacccaatacatgtttgttaaatgaatgaataagagtaatgctgtttttgagtaattcaaagggtgtgatggtgatagtattttcttttctttttttcctctttgttttcctattggtagcattagaaataagttttttgggggggtattccaatggagagtttaaatacttactagacttggctgggcgtggtggctcatgcctgtaatccctgcactttgggcagatcacttgaggccaggagtccaagaacagcctggctaacatagtgaaacctcgtctctactaaagatacaaaaaattagcgaaggtgtggtggcgcacacctgtaaccccagctactgcggagattgagaccgcgccactgcactgtagcctaagtgacagagtgagaatctgtctcaaaaaataaataaatacttattagactaatgctctacacttgtcacaatggaagtcgagccactttgaaatgcagtttatatggcctgtttcctttttggtgacatgaaacaggcatgctgcatagcagaacaagaaaactcatgttgtagaaaccccctctgttggctgtgttgagtgggtggggatttgaggaccttcacactctgcaatgcaaagttcccagaggggttagaaactcctgaccctagaactcccaagtttaatggccacttcacctgtcacttcatcattaaaaaagagtgagatttttctagaataaagaagaaatctcattaatttgaatttcactattttagggttttgttttatttgtgtaattctgacacatgtactacaaaaatgtaccttcctccgtgatgtttattattaatgtgtcctctgaatgtatcaggttcagaacagaaacagtacttgtgtgttttagttcacattactcatcatatttaagtaataaaactagcagctctttaaaacttattttttgtttgaatagatttctcgtgtgttcagattagtcttttcccagttagtttgttgtatgcacgttcttagacatttgccactgatgtttaaaaattgtttagctgaccacatagtctttggagactactaagaaagaagtttatattgtgaggaggtgacaacaggcagcccaaagatgggagaatatgtttggatgaatgatgacaaaaactcaacgcccaggaacgagttatcccaaccatcagaaatccagcatgaggtgaatatcctggggcctgggttttataatccatcactgacttggggagtagatatttaaacagtggggaaagttagcacataaacctagctgctaaaatggcaagtgatttttttttttagtgcaccagaaaagggaaatagcggaccctctaagcaattaagtggccaaattgcgtgtggaggtttggcaaacagaccaaagtaattcagtccatggacagcaaaatagttttagttgaagaaactgtgaaggtttaatttattttgtttgccaaggagttgatgcattcaggggtgagttaacaaaagaatcaaagagtttgaaaatcaagtcagtgatctctcccctttgtgaaaaagaaaagaatgcatgttttgttttttttctttgtctttatttttataagagcactttcttactgaatattgtttaacataaagagacaatttacttgtgaaagttcattcccctctcaacaaaaactgagcattgctctttcttatattatgaaaaatcagtatctactattaacattctaatcagtgtagaaattctaccatttaaccaccattgcaaaagaatgttataatatgtcattagacatatgtaaaaactcatcaagctatacatttcagatttggaacttcaagttgtattgctacttttaaaaaatttttgcattaggagtggtggtcagagtttaagaattatatttgataatttaaggaattatatacttcatagtactatgaagaggatattctttatctaaaaaggttccccaaggactgaagcttatggttaattaaaaatagaataaatataaaaatctaccttcaagttactatgttaattatttggcacaactcaaactccagaggctgaaaaagaaaatgttgtgggcatgtttttcagtgttcacttcaaagcagaaatgtaatattcattaatcttgttctttgattgtgatgttagctcttttgttactgtggagtttaccttggcctgagtgctggcaattaaatagcacagtgaagattactggaaaacattaacttgttattgttagttgacatcttgctgaggttgatgggaagtagagtttataaatagccttgcccctgtgcattgattttgaaatctactgagtttcagggatgaatctcattattcagaccattcattacttacatttgaagctttttatttcacagagagtagtttcatcctttagaaaaatgtaatattgaacatagctgtgatacacccttgttgaaacttttgtgttcagtattaacttcttgagtaaattagcttcctatcatttgcttaactttatttttttggatattatataagtgatgatcttccactgttttagaaaggggcctatattccattctgttttatataatttatattttaatctagaatgatctttatgtttcaaatgttttcaaataagcatccttgaacatttgcagtgttcaacatgaaacttctgtttgtttgtgagaacggtgttgctgtatgtcctttcccgaaagcggcctgccacttgaatttttatggtgcactatcagatgcaaatcattaactctgagatctctccagcatgatggtggaaagaacacagggtcaaagcagtaatccatgagggatgaaaggaagttgactctattatgagaaatctaggcagtcaaagtataacaaaagtttctagaaatctggccaaatcgccaaataattgctttgctctttcaggccaagaggcaaaccctaagtttgcattctcattctcctcattaactgatggtgtgggaaggattcagtgctattcaggtaggctttaagacgtggagtttttttgaactgagtggtggctttactgattaatcagtaaggttttcattgagtttcaattaaatgctcagtactgtgctaattaagcactgaatggatgtaaagcagtataaattcttcactgggatcttacagcatggttggggagacacaaccaacaaacctgaagtagaaacattggagtacaagaatcacatagtgttaattttaagtccaaattaattttcagtccatactcacagcatggctggaggatgtagaaatttcatgactaaattctaaagagttaagtcatttggctatatgtcttcagatctctggttgttaggacactgacaaaaacaggaagattttataggctgtcagtgtttcccagctttacctgacatgagagtaacttggggcactgatgaggatatggattcccaagtgcctgtcctggagattttggtcatgaaggcctgaggtaggacctcagaatctgccttcttaatgagcaacctaactgattcttgtgatcagacaaacttgaaaaatactggtttaagtgtggaagagagggacgtaatgtacaaaacctagttaatataagagataagttattgtttttagatctaaaggataagaaggtgtatcccccaagtgatagatattatatgtcacaaagtaatctgcttttgagattaaaggaccatgaagagcactaagaaaaccctgaaatttctaagctcaaatatttaatggacaaaaggtgttctggatttcattttatcacttgttccactctaggaagggtgatcctggtcattcatgtggagaagtgggcaggaagacatgagtaaggaggacacatttgaaatagctcatggtattagcttggcagacacaacgggagactcttccaagactgctcaaaggcaggactgaaggaagcaggagactgagcaatttagtaacaatgtttggtggtcaagatcaaggggcatgaagtaagagttgtgggaaacgagggcagagataacaataataattttagttgcacgtgatacatcttatgaagatcaagtaggtcagcagtatgtgtaaactcttgggcctcatgacatcctcatcctaaaagataggggcagggtggtggtactacttcagttttacagcttgaaagctagtgttaggagaggtgtcattgctatagacagtgaactagagaaaaaagtcagagaatttgagccagtaggttttctaacttgtgatgttaggttggatagatgttgggggactggagaagagaaaaaactatgtttgagttgaggtggtgagtctaattgttaaattttaagtgggtttcagtataggtaaattaaaaggaagttatcaacagatttaaaaagtgctgtgggccgagcacagtgactcatgcctttaaccccagcagcactttgggagcctgagacaagaggatcacttgaggccaggagttccagaccaacctgggaaacatagtgagaccctgtctccacaaaaaaaaaaaatagccggacatggtggctggcacacacctgcagttccagctactggggaggctgaggtgggaggatcacttgagtccaggagatcaaggctgcagtgagctatgatcacaccactgcactccagcccgggcgacagagcaagaccctctttcaaaacaaagtggtatggagtggagatgatgaagataaggggctaacgatgttgagagggcttttagctttgagcaaagagaaactagatttgtatggcaagtaaagttgatggttcagcacaagtatatgatataaaatgaacttttgtacctccttaagatgactgatagatgacacactgataattattatccacatcttaaccatatcttttctggtaagcctactttttaaagtagtctgcaatggagaaaggtgtttttgtttgtttgtttctttgtttgtttgtttttgtgagatagagttttgctctttttgcccaggctggagtgcaatggcgtgatctcggctcactgcaacctctgcgtcccgggttcaagtgattctcctgcctcagcctcccaagtagctgggattacaggtgcttgccaccacgcctggctaattttttgtatttttagtagagacagggtttcaccatattggccaggatggtctcgatctcttgacctcgtgatccacccaccttggcctcccgaagtgctgggattacaggcgtgagccaccgctcctggccagaaagtgtttttaaaaattaaactttgcctaggattttggtctgtgggcttttttctctccaacataacagtagagagactggaaaagcagtgaactttagaaaagtggtaaagtaggtctttaccatcccattgttgcagcgtcactcaataattgttcctttccccacagttactacaatcttgtaccttgcctctaatgacagaccttggtatttcaaatcagcacctgttgctagatttttgttttttgttttgataaaggattaaaagaagtcaaagtggatttctcagaacatttaattaatgcaggctcacaataccagttggtaatgttaggtaaacgtgtagttcacccacaaggctttttaatagatgaagaatcctgtagtcagaaaattcaaaacatgacccaaaaatattactgaatacagtctacaatattgaataatactgacttgagtgtagggaattttttaattaaaattttttaaaaaaagacacataacataaaatttactatcttaaccatttttaagtgcacagtttagtaatgttgtgtggtcacattgttgtgcagccagtctccagaacattttcatcttgcagaactgaaactctatacccattaaacaacagcgccctatttctcctttctctcagcccctagcaactaccattctattttcttgtgtctgtgagtttgactactttggtacctcatataagggaaatcatacagtatttatcttttttgtgactagcttcactttgtattatgtctcaaggttcatctgtgttttggcatgtgtcagaattttctttttaatgctgaataatattcctttgcatgatataccatattttgtttattcttctgtcagtgaacttttgatttacttccgcctttggctattgtgaataatgctgctgtacattatttgctgtacattgaacatggctgtacaatctgctgtacatgatcaatgctgtacattgaacatggctgtacaaatatctctttgagaccctactttcaattctttgggatatatccctagatgtagtattgcaaggttacttggtaatcaatttttaatgttttgaggagctaccatactgttttccataaaaatgtagggaatcttgattttttgttttacttagatggtaacttcattgggaaccttgctgatttgcttgttggcctaggtttcctccactattaagaaatgttgtatgtaaacttttgctttcctatttatattcctccactgtgttttggctacctcctcctctcttccccaccttcatatctcgatccttttgaagcagttaaatattctgcttttttcactgaattgtttttaagatctgagaaattggagattggagatcaaggtgatcatagatcactctgacctctttatctgtgacctcttcctgtgaaaactccacattcttcagacagtgagctttttcttcttcactccaccttacttaggtctttaattgactgaatccctatgcatctgtgtacagttcattagacagtaatttttattggtcggtattttactttttaagtgaaattaatttcatttcattgcatagaacccatttaacttgctaaatatgtatgtgccaagttaagaaataaaagagagagaaactattagcaattcaaatgttgcctttttctcaataagcacctgccctgcagtgaacagtgaaatggtgtcccactgtttagtggtgacacaaagatactgtctctttagtatctctatgctcaacataattcaagggtcattttttactgtacacaatattcacgttagtcacttgctttagaccctgctcccacatattatatgttattgcctcaaataaatcataaacttctaggaagttgagattatctcccttgcacccctcattagattgggagacagtgtcttcccatctgagcaattataaactcttaattttaccccctggcctatccacagtcctggcctttccatcttcagcaaatgagactaccattcacccagtttctcaagaggaacctggggatcaaggaacccaccttttttttaacttgccttctaatctactggtatcatctacttctgtacccttattctctacactgctatccttgtgcaagccagcctcatcttttgcttggacaactgcatttgcctcatatctgacctgtctgcattttgtgcgtgtgtgtgtgtgtgtgtgtgtgtgtgtgtgtcagagtcttgctctgtcacctgggctggagtgcggtggcgtgatctcagctcgctgcagcctccacctcccaggtttgagtaattctcctgcctcagcctccctagtagctgggactacaggcgcctgccaccacgcccagctaatttttgtatttttagtggagacggggtttcactctattggccacgctggtctcaaactcgtgacctcaagtgatctgcctgcctcagccttccaaagtgcagggattataggtgtaagccaccgaatctgcgtatattcttgcgccctttaatctgtactctatatagggagaaggatcttttaaaaacacagatgaggccaggcgcannnnnnnnnnnnnnnnnnnnnnnnnnnnnnnnnnnnnnnnnnnnnnnnnnnnnnnnnnnnnnnnnnnnnnnnnnnnnnnnnnnnnnnnnnnnnnnnnnnnnnnnnnnnnnnnnnnnnnnnnnnnnnnnnnnnnnnnnnnnnnnnnnnnnnnnnnnnnnnnnnnnnnnnnnnnnnnnnnnnnnnnnnnnnnnnnnnnnnnnnnnnnnnnnnnnnnnagcgaaactccgtctcaaaaaaaaaaaaaaaaagatgagattaacttaattccctacttaaaacccattagtcagttaccatcacaattacaataatctaaatctcttacagttgcttataaacaccaaaatgacctgacccagcctacctctccaacctcatctcatgctgctttcctcctttcattcatctctaactccatggaccttcctctaataaccaggccttgtcctgccctagggccttgatatgtgctgttcattctacttggaaggcatataagcagatgtcaacaaacatttgctgagtgaataaacaagtcaggcgcgtcataaggatgtagactatactaactgtcatctcccaaaagtaaatgcagtacatggtgtcagtatatataatagaatgcctagtgcagtgattctccattgtgagccatttttctccacgggggcattggcaatgtctgaagataccattggttgtcactactggtggtgtgctgtcagcataagatgggtagaagctaagggctaggaaacatcctgtagcatgcaggacaactcccacagcaaagaattacctgacaacaaagaactaacatttggggaacgttagtagtgctggggttgaaaaatcgttttagagtaatacatttgagttaggagaagtcaattttaatagcagtgctggcccttcaagtctgtcatattacctaaacagcttttaaaatttttttattttctattttattttcttttatttttgagacaaggtctggtcctgttgcacaggctggagtgcagcagcagatctcggctcactgcatcctttgcctccccagctcgagccatcctccctcctcagcctccctggtagctggaactaaaggtgcacaccgtcacacccatataattttttgtaattttggtagataacagggtttcaccatgttgcccaggctggtctccaacttgtgagctcaagcaatctgcccgccttggcctcccaaagtcctgggattacaggtgtgagccaccatgcctggcctaatttttttatttttatagagagaagatcttgctctatgaggcttgagtgcaatggtgccatcatggctcactgcagctttgaactcctgggtacaagtgatccttccacctcagcctcccgagtggctggcttatttaaatactagaacgaatcctcgtgtttggagactgctttctcatcctcaggaactgtgtgttatttccataagggtaaatgccactgctccacagactcatgaactactcctgttggtgggtatcttgctcacttcctcataatgctaagctgaactcagtctttccatttgtttttccaataataaaaatgaccagtgataaccaaagttgaagacatccctctggatcagatgagaaatctccctctttctcttctgccacttcaaaggcttttgaataaacaaagttttcatgatagccaggaaactccctgttatggagatatgattcgttctacatagagttcaccattaatttcaagaagattgggattaactacggtcatgcatcacataacagcatttcagtcaaccacagactgcatatgtgacagtggtcccataagattataatggggctaaaaaatttttattgcctaatgatgtagcacaatgcattactcatgtgtttgtggtgatgctggtgtaaacaaacctgttccgctgccagtcaaataaaagtatagcacatataattatatacaacacataatactcgataatgacagcaaatgactatgttcctggtttatgtatttactatgctttttattgttactttagagtatattcctgatttaggcattgttatcataggaggtgactacctaaaaaattgttaactgtaaaacagtctcaggcattgtgattatatacggtgactgctccatgcgtgttattgcctctgaagactttccagtggaccaggatgtggaagtggaagatggtgattttgatgatcctgaccctgtgtagtcctgggctaatgtgtgtgtttgtgtcttagtttttagcaaaaaagttaaaaaagtaaaaacataaaatttaaaatagaaaaaataggaaaaagcttaaaaaataaggatataaagaaattattttttatagctgcacaggtgtttgcattttaagctgtgttattacaaaacaaacagtttttaaaaatttaaagttgataaggtaaaaatgttagagcaaactaaggttaatgtattattgaagaaaatttttaaaatacatttagtgtagcctaagtatacagtattcgtaaagtctacggtggtgtacaatgatgtcctaggccttcacattcactcaccactcactcactgactcacccagagcaacttctagtcctgcaagctccactcatgatgagtgctctatacaggtgcaccgtttaaaatcctttatattaatagcatatttttaccataccttttctatgtttagatacacaaatacttaccattgtgttatagttgtctaccgtattcagtacagtaacatgatgaaatcgcctaacaacacgtttctcagaatgtatgcctgtcattaaataatatgtgactgtgtattgccttttcttgtaaatcaaaaattatggaattttaaacacatgcacccataattcataccctttgaagtaggactgcaaatgtaagatcatcatgcttcattatgtgaacatccagatatctattttgtgagactaatacacacaggaaagacgctttgcttcctttgaataaggtaaaagcaaactggccagattcacccaggaaatgacctacgttgggagctaaagtatttgttccagtgttacctgatttgggtcatttgggaaatactaaagaaaataagaatgtgctttcttagcctattttaaagagttttcctctctcagagcagtccaaaagggctagaaattatacctctggatatgtgaatttatggagcagtctcagttggaaagaatatcaagaataaacctcttgagggtcataactaatagagttaataccttcaagggtcaccagattatttttttctaagacactgagtggtacaacttattcttagatgtacatcacaaatacagaaaatttaacttatgataaaaagggcaaccttgataacaaataatgtatttcttaaagcacctgagggataatcataatttatccttgccatacatttgtcattgtgatgagctgtagtaagatgattcgtcagaaagcacagtttctgggacaatcaccacagaccactaagaaaaatagtgccaaggaacgatactgccaaaggcagaagtccagtggtcaagtcaaaacacctgccaaaaaagaacataagcaggaagcacagaggagtcaagaaagctactgataatgcagagctaggagaacaggagaaccagatggctggagaggagtgaagtgagtctccttttcacatcagcactgagagatgccgtcagttgcaccacagaattgaaaccacatgtaggctatgccattcattaataagagtgactaattttttaaagagaaattacaaagcactttgtacatcaattatcttttagacttcatggcaacctcatgggatatgagaggagttgtattattagctttattttatagatgaggaacttaggactcaaagagattaaataattttctaaggctaccagctatgtcttgactacaaagcccgtgatatgatagtaggccagggtttctcaccctcagcacaattgacattttgggctggattcttggttgtaagaagttgtcctgtgccttgtaggatgtttagcagcgtccctggcctctgtctactggtagcaccccctttcagttgtggtagatgctggtagcaccccctttcagttgtggtagatgctggtagcaccccctttcagttgtgacaactaaaaatgttgtagatattgtcagatgtctcctggggatgaactcattccacgtttagaactcctagcctgaggattaaagtatcagtctagtattagtatgagtctagtgagcaccaagagaaatatcctgttgtcccactgtcctcagtcccaataattggctaaaaggacttctttaggtggaaaatccataacaacttctctttgaactttcccaaacgatcctcatagccttccagcaatatagtgaaagggaaaggccaaaatggtttatggacagatgggtgggtgactggttgcttagagagagtcattgtttcattcagctatcgactcaacaaataaacttaacagttcctgggaatggtttcatagtggcatcagtgtttgagctgaagtaggtttagaaggaagattattagtttcctcaagatgagcttggggaaagatgaacatgtaaataacctgacatgtcagtaggctaggacttaaaaggctggtggcccacgacacaaacatattccagtcttgaggacctgtagtcattggtcatcttactttgtatgccaaaccatttgcaagcagtcttgctgtttactttcactgttgagttaactattgccttacaagtactgtttatctcagcccacatggtaattgccttaaatttaaaatcaaatcaacaaacgtttgcactccagcaaggctctataggagataaaacgacatggtttacataaaaagatacatagtaattaagataacatatcctaggtgccaaatgagtggttcagataagtgctatggcatgagaggatggaatgattgccatgacctggaattgtcagagagaactttgcaaaggaaattggtgagctgagcctgaatggatgagtagaaataatatgaaatctttgtaatagactgataattgcactttgattaatttgcccagcacaccatgttagaaggtaccttttaggttgattattttaataccacctacatctcattatcttggaatatatctaataatagaaaaaaaaaaaagcccgttggagctggggccagtagcacatgcctgtagtcccaactacttgggaagctgaggaaggaggatcccttgagcctaggagtttgagtccagcctgggcaacacagggagatgccatctcttaaaaagaaaaaaaaaaaaatccagttaacagcttatccatgatgattgtccagagtttattgtcagatcagccaagaaaatgcctaagagtaaaaggggttgtttggttttgtttgtttgttggtttgtttttagtcttgctccatcacctaggctggagtgcagtggcgcaatcttcgctcactgcaacctccgcctcccaggttcaagcaattcttctgcctcagcctctcaagaagctgggattacaggcacccgccagcatgcctggctaatttttgtatttttagtagagacggggtttcaccatgttgaccaggctggtctcaaactcctgacctcaagtgatctgcccgcctcagcctcccaaagtcctgggattaccggcatgagccaccacacccagccatgaaaaggttttttgatgactctcagggatccgaggaggctcataaggactgatatcacaggccccttggttcagttagatctcacagaatcaccattctctgaacaaaggtgccctcttaggaaatggggctcaagatttggagaggccttactgcatcctttctctatgactttggttattacacataattgcaggactgtgggaggcatagttatcaataagggctacagaggcttttgacttaagacactgcctggtttattccacaaacaccagctgtctagtagactttaataattatgcataaaatggatgcaacagatgttcctggacctcactgctggagattttgagtggcaaatgaacaaacaaactagatggagggggaagggcaaccacccaaatctccattcctaggggcttagaggaatcattttttcccttataaacagccactttgtaaacagttgtcactttttgacttttaaagattcacagtcttttccttttgtttactttgatgacctttgaaataagctgcaaccgaaagaggggaaaaaaattccatctttatttttctaaaagaggagtctgtctgttcccacagtgcattggaagccagcaaactcctgaggctgtctcaggcccactcaggttttggggcctttaggtacagttaagtccagttgcctcaaaccccttcactgggcagctcagagtaacgtgcattaccagatgctgggtgccaaacagttttctgaaagccagtctctctttacaaggcaaattttatagcctctctaaaatctggaaaatgcaaattaatataactttacatttcttttggcctcatttgcagaggaggcaacattagagatacagttctggctcttaagaaggctgccacctatctcccccatgaacagccttctctgcccccagtgggtttctcctctgacctgctcttcagccacattgggcacagaactgaaaagtcaaaggaggagaccagagaggaagagccttgggaatgtcaaagtttcttatctttgatttctctctcggtgaaaataccacacacctacctgtcccaataattagtatgtgaattttcacaataagtagggagttagagaatatatgacaaaaaaagaatatattttagcttttattgtttctgactctaaaagtaatgtactttgtggtgataggacagtcctgtatcttgattgtggtagtcattatacagattcatacatgggataaaatggcaccgtcctcccccaccaagtggacgtgtgtagaaaatggtgacagctgaatcaggtatgcagtctggttaataatactgtgcctatgtcagttttctggttctgacatagaactatagttacataaggtatcaccattggaggaagctgagtgaaaggtacactgactatgctgtttttgcaatttgctatgagtctacaatttcaaaacttgaaaaaaattgaaaagtaatgcatttctactgtaaaactttctaaattacagaagtatacaacattgaatgtaaaaatcccactcccccaattaacaacttggcattaataaaaatgggatcataatatttttgcagcttcctttttcactttacagtatgacttggagatctttccagttgagtctatataaatctacaacttctttataatgactgtacagtttggctgtacatgacaggatatatgtaggactatcccttactcttttcaactggtcccgtattggtcatttctaaactttcctattccatacaaccagtgctgctgaagatgatccttgagcatctacacctttgctcatatctgtttgtctgtaaaataaactcctagaagtgggcataacaaaattaaagaaagtgcgtgtcttccattttgatagcaaatgccggactttcaagtcgtggttttgcccaactccattgggtaccatttgtgtagaatatgttatgtatacaacatgactctgctgattaccctccaaaaaggttgtgacaatttatacttccaccagtgatgactgagagtatcttattttcttgtccatctatcagttgggtcttactctttttaaaaaaaaagtatgtgccaaatccataggttaaaaaaaaccctcattgttttattacacttcatcaaacactaatgaaattaaacattttctgatacatttattggctatttggatttcatctgtgaattgtttgtttatgttctttgctaaatacttgcagttcccaaagtatgtggcaaggcatgggatattttcaattttagggataagcacagtgacacttgccatctgtcagacattatgtgaattactagcacaaagtaatttatagtttttagcattagctcatactacattccttttgatgatgctgtatctttttgcaaagttgagcatttggtagttgctgtgataaaaaagcaagtgccctgagaaaatccatgtggaacaagaatgagtggtggagtccaaagctggggaagccatgaagtatccagtaggcacatacatcccattagtgagtaattgtggttatttaagaatgaaaggaaaatattttttctttcaacttatgtttattttttcacacagccactaagttattaaggcataaatacttattggattgtttggacctaactacttaataaatggaactcttagctatttcctttggccttagggcaccctgaaaaaattagtgaggtactaaaggtgctttgaattgagaaagtttgagaattcctgccatatttcattcagttactttcatttttgttattgatttgcaaattttgttccttaggggaattagcagatattttacccctggtttccctttactttttaatcttcatagtagtttttgctatataaaagttttcagtttttatgttgacatatttatacatcttattttcccctattcatggctttttgtttattcttttaaaaaacacttttacctgctgattataaaacatgatatgaaacatatttcattcccttctagcatttttatagtttcttttttacatttgattcttttctccgtctggaatttatcttagtttaaggctttagataggaatccaactatatcatttcccaaaggactggttgattgtcttaatactgtttattgaatgaatcaatgttttcactactgttcaaatgtcacctttatcatctacttagcttccacgtgcagaatttctaatgagtttatttcttggccttctgttctctatttctcttatagcccttaaccgttttctgtcttaaatttcagtatgtacatcttactttctgcactacatcataagctcttcctatattggttatttttgtgtcctatacactaagctattttatctttccattcttcctccctcactaaatctttttcacatttttatattatagaaatttttagatatacacaaataatataatgaatccccatgtatccatcactcagcttcaaacattatcaatcgatggctaattttgtttcatttatgccactatcagttccccttctcctttattgcattaaaattaactgtgtctgcagtgggaaagggatagttttttcagtaaatggtgctgggaaaactggatttccacatgcaaaagaatgacattggacccttataccttacacaaaagtcaactcaaaatagataaaagatgtaaacataagacctaagatacaaaactctaagaagaaaacacaggggaaaccttgacgttggccttggcagtgatttcttggctgtcacaccagaaggtcagtctacaaaagcaaatatggataaaaggatgatatcaaactaaaaagcttctgcgagcaaaggaaacaataaacaagttgaaaaggcagcctataattatcttacctctgttaaaatgatttttaaccaagacaccggcaataatgagtgctggcgaagatacggagaaaggggaacctttgtacactgttggtgggaatgtaaattagtacaatcactgtggagaacagtttggaggttcctcaaaaagcaaaactagaataccatatgatccagcaatcccactactaggtatatattcaaaaggaaggaaatcagtatatcaaagagatatttgcactctcttgtttattacagcactgttcataatatccaagatttagaatcaacctaaggcctaagtgtccatcagcagatgaatggtgtattagtttgttctcaagctgctaataaagacatacccaggactgggtaattttaaaggaaagaggtttaactgactcacagttcagcatggctgaggagacctcaggaaacttaacaatcatggcggaaaaggaagcaaatacatccttttcgtggtggcagcaaggagaagtgccaaggaaaagggggaaaaaccccttgtaaaaccatcaggtctcgtgagaactcactctctatcatgagaacagcatgaggataaccacccccatgattcaattacctccctctgggtccctccctcaatacatgggtttatgggaaccacaagatgagatttgggtagggacacagccaaacaatatcaaatggtaaagaaaatgtagtccatatacacaatgcagtactgttcaggcataaaaaagaatgagatcctgacatttgcaaaaatataaatagaactagaggttccatgttaagtgaaataagccaggcacagaaagacaaatttcatgttttcactcatttgtaggagccaaaaattaaaacaattgaactcatggagatagagagtaaaatgatagttatcagaggctggggaggaaaggaaagggggatagttaatgggtacaaaaatatagttaattagatagaatgaataatatctagtatgtgatagcacaatagggtaactacagtcaacaataatttattgtacatttaaaaataactaaaaatataattggaatgttcataacagagaaatgataaatggtcagtacacatcgtatgcctatatcaaaatatcttatgtaccctataaatatatacagctaccatatacccataaaaaataaaatgtagccaggcatggtggctcatgcctgtaattccaacactttgggaggccaaggcgggtggatcacttgaggtcaggagttcaagaccagcctggtcaacatggcaaaaccctgtctctactaaaaatacaaaaattggccgggcgcagtggctcactcccgcctgtaatcccagcactttggtaggctgaggcgggcggatcacgaggtcaggagattgagaccagcctggctaacacggtgaaaccccatctctactaaaaatacaaaaaattagccgggcatggtggcaggcacctgtagtcctagctactcgggaggctgaggcaggagaatggcgtgaacctgggaggcggagcttgcagtgagccaagaacgcaccactgcactccagcctgggcaacagagcgagactacatctcaaaaaaaaaaaaattagctgagcttggtggcccatgcctgtagtcccagctacttgggaggctgaggcagtagaatcacttgaacctgggaggcagaggttgcagtgagccaagattgtgccaccacactccagcatgggcgacagagcaagactccatctcaataaataaataaaataaaatgtgaaaaaaggcaacctacagattgggaaaaagtatttgcaagccatgtatcagataaggggttattatctaagatttatgagtaactcatacaactcagcaggaaaatatataacccaatttaaaaatgggcaacgaacttgaatacccatctcttttatatctcaaaaaagatgacatgaaaatgtccaacaggtatataaaatagtgctcaacatcactaatcatttgatttgcattcagatgaaatcaaaaccattatgtgatgccacctcactcctcttaggatagctgttatcaaaaaacaagagataagcgttggtgagggtgtgcagaaaagggaacccttgcatcctgtgagtgggcacgcagattgatgcctccatgatggaaaacagtgtgaagattcctaaagaaattacaaatagaaccatcataagacccagcaaatcctgcttctgggtgtgtatccagagaaagtgaaataacctgggtatccataaatggatgaatgaataaagaaactgagatagatagattatgtgcagtagaatattattcagcctttaaaaaggaggagatcttgccatttgctacatgaatggaccaggaggacactttgctgagagaaataagccagacacagaaaagtgtcgcatgatcttaattatatgtggaatctttaaaaaaataataaaagtcaaatatatagaacgggagaataaactcatggttagtggttaccagggttggagtataggataggaaatcagatgtaggtcaaaggatacaaagtagcaattacgcgggatgaacaagttgaaagatctaagtacagtattaggactatagttaataacccactcttgccctggaaggtggtggtagggatgctagttactatgtgaaataatgagtatgctaatttgtttcactatagtaaccctctctctctctttctctttctctctccccctctccctctcctcataacatgttctataccttaaatatacacaataaaatttattttaaaaaattaactttgtcttgactgaacaaatcatctgcatttttttattattattattattttttttttagtctcactctgtcacccaggttggagtgcagtggcgcgatctctgctcaccgcaacctccacctcccaggttcaagtgattctcctgcctcagtctcccaagtagctgagattacaggcacaagccaccacacccagctaatttttgtatttttagtagagatggggtttcgccatgttggccaggctggtctcgaactcctgacatcaggtgatccacttacctcggcctcccaaagtgctgggattaccaggcgtgagccactgcgcccatgtattatttttcattagtaagttttactacattaagagtttcttgttgatcttgatactctctnnnnnnnnnnnnnnnnnnnnttagagcaggtattatgttagtgtttagttaattttaaattcttcatatgcaggccttcatttgtatgttgggttaaggttgactatctgacaccactgtccaaaccttgcccttacgaacagcttgggggcccttgttgggggcccttgacaagtctcccctgtgaaggaactcataattactttatagaatttagaacaataggtgagagattatccaagacaaatgtatactttctctcttgtcaatactatttcccccaacaccttggtgtgaccagagtttacagaggtgacttttagcaccccagctgctgctgcaaatgcagcttctgttctgccacccctagcaagaccgtggtagaattccgaatcaatgaatcctctgttttcagcccctctccctgccagataaagagctctatactctagaaaaggatagtatagattgataaccatgatgatgggattaaacagttttttaaaatcatcaaattaaaggagatgttggagcactgaagagaaaaacagtgagttttagggtgggagtgggggtagttgaggaaagctggggagagttttatggggaaggtgacgtttaagctgggccttactttattaatggaatttcagtaggtggagttggagaaggtggggagacaaatgatggaacgtcctggccaggaaagcatttgtaagttgttacgaatgggaaattgttctttgtggccacagaataggttcgtaaagtggaggaaacagaaattaaatctagaaaggtagattgagcctttagtgccagcacattctttaggaggttgaaagtcattgatggattttgaacttgagagtgatgtcctcagagcttggctttaggaatatttctttgctggccatttgtaaaataagtgctggaggcagagaccaggcagttaagttgtttttagcatctgggtgcaaagtcttcttgctcctgaactaaaatagtgggagtgttaatagaaaggaggggatggatttgaggcccaaagtgaatttccagtccccagcaggctttgtgtttttgtacactgtagtccttaaagatattcacggcctgtttcctgtgattctctccccaaactagaatcagctaggaagtaattacactttgtacttagcatccttttcctggcagcaacacacaacacagtaaggtgtcatgttttggggacttagcaagaccatcctaaggatgtattcttacccaataaacaggttgaagtttagggaagcaaccacatgaaatgcttcctggctggccctctagcagattggtggattcatgtggacagcaagtgcccaccaagcactttcttctggggaatgaccaggttgaggaattcaggtatcccaaggttccggctctagcccagttgggctgtgaataaaaaacaacatgttgagctctgaacagatgatataagtaggtacttatacccagtaagcatggcaccctgcattgtggaagtcagaggcaagaggggtgctcctgagaggcctacggcctagttggggttcagttaatatgcctgaagcggaaaacaaatcctagcccacactggaatgactgcaaatgacatactgtattgttagagacctttctctctcttgccttcccaccttgccctccactcacatacaaacacaatctgcattttgaataatttttgctgtatctgtttcccagcagtgatgtgattgggcttgtttctgtgaattagaaagtttagattcctccctcagtcatctcccttttacccttttaccccctttcaatctgacctagagccataaaatacttctgcctgcctgcctgcagttctgtttgtatgaattaagtcgacaggataaatattcacattcccaactacaggctgaaacaatgtttgcctgttctacccagtgagtcgagaaaaaaagggggcctgacatcaccctatactgtacattcccagcatagatcatttatttaagtccctgaaaaaatacagatgttttaccagtcgaaataaaatcctgtgtaaacactaaggaaaatgtggcactgacttagctttgggggttgaagcagtgcagggagaaaactaggcaaaatggcagatacagaaattttatacttggctgaaggtgatagggtcaaaaatattcacctgcagtctgcatgcagcaagggaaaaacatagcatttgcttttaagaaaatacagttgcaaaagtggacaggttttttaatcttcagaatttgaggtttttaatgattacgatacatttcccccatttatatctgacctttgaaatgagcatctcttttcttattagagttgtcttttttcatagcctgtctaaccttgtcctgttattgctggatcctgctggtttctggagctcagctgctgttgattttataagggggaaaattgcctggaagccatgcttggtgaagaggaaaacccatctcagcgttgcattcccaaacaaccatatatcatcttgatcttgtctaacacaagttgctattttagtccagcagcataaactagacatattttactggtgcagtgcaagttttttcagggaactgcctcatgtctctttttaggcccatggcatttattcaaagagcatttcaaagctgccaaaatggaccccatgctttgcacagatgcctggggctcccctgagtctctctgtgtttagagtggaggggtgagggacagagggtaactgcttccaggttctccagacttctcagttcccctcaaactttcattaaggcttgcatctcaggggcaagaaatcagcctactcactgacaccctcctgcagtgcattccctgctcctcccagctgcttccatgaccaccccctcctcagggcagggctgacagtcccatctcttggcagttccatgcctatgatagtcatggatgatgctgttggcttgtacttgtttgtttcataatgtgctttcagtctttttctgattgggtcataaccatcttagggcaacaaagctttctcctgtttcttgtgctgatgacccctatgtccacctctaacccttctccaagggacctattacagctaggggtaagcatctgtcctctgtttttcccagtgtgattattaatagagctcccttttgtccctgaagaattcttttttgcgacataaattatcctaagtaaagcagtcatcacacggatattcccaaccaaactcattaattcccctccctcattcccaagcctgctgtagattctcttataatctccatcttgaaagatgccccttgttcaccagctgcccaagttaagaggctctttcctgcgccttaactccatgtctaaagcagttgccaagccctgcctctgcagcccgcagaagctctctcagatgtatcctttcctctccttccattgctgttttagtttagattggggtggggtggagatgtcacaaaatcagaatcctacccgtgccaggcaggtaagtgaaccaaagggggatgagtataaacacaggggctctctgcccattctttgttttcaaacttttagtagagatttgggttcagtaagtattttatttttttcttgattctccgaaagtttaaaacaaacaaacaaaaaagcctaagagctttgataaatggcattgaccctccgtcttagtgactagagtaacaggcaatagtaatagtggtgacagcggtggtctagagagtgcagttctcatctccggggccagctcctgctgctcagctccggccaggtgactgtttgccctacaggaaggtgggccgctatagccagatctaatttttcaaaatggaaatcaggatgactttaatgtgaaatatcccaattcataaaggttgatttaaaagtactgtatgggctaaataaaacatctgcagccacttttggcccaaaggctattggttttgagccgctggtttcaaccctcccctcctcttgtctagactactacagtagtcctgggcattccaccccttctgctatgacctccacactgcccctggcttttttctccaagttacagatctcatcacccaacagcactctctgaagaaatctttgccgtctgcagaataaagtacacattccatgacattgcctttaaggtctttgtctgactagacccgactcctttctccagctgtgtctgccaccaccctgtgcacaccctggctgttctctgcgcacacaggaccacttgttgtcccctgagtagtaccaatatttttaaaaattaagagactatttttagaaccattagatttagggaaaaattgaactggtaatacagaaagttcccaaatatttttctcctccccacctctttcccccaattttctcctactatgaatatcttgtatttatgtggtgcatttgttacaattaatgaagcagtatttacacattattattaactaaagtccatagtttaagattcactctttttgttggcattaccaatattttaatacccttaaaatgtgttttaattgttttcactgcttgcatacccttccctcgattctggcaagactgtttttaaggccacgtatgcatatcactctttctgcaaagtcttctctgactgtttatttttggaatggggctggaagagagggagcagacagaacatggaaaagaatcaacattgttatcacttccctagtgcgtgcctagtagtatatatattcttttaaatctctctacagtcctacaagttagatattattatacgccatttaccatggagaaacagaggttaagttgcccaaagccgcaaaactgataactggtttacacctatctctgcccggcttcaaaatccatgctcttccactttcccatgaggctggattcttagcactaatctagccttcctgcctccaccatcagatgaggcatccactgggatgaggagtacggcgtgattcagctctccgttccactccagacacagaagtcggcactacgatagctcacaaaacccaagggaatgtgtcctaaaggagtgaatataggaagaagcaccaaacaccaacatcgtttttatttggcaaatgcttgttgaattcctacagtgcatcagacttgttggagggggaggtcaagcatacaaacaaaagtgatgacgatgctgccatgcaggttgtaaatcatgaccaggcagagtcaggaaagctattgatttttcatgtctccatgactagaatgtaagctacaggaaagcaaggaactatctggtctctgctgcagccccttggacagtgcctggtaataagagttgtttaataaatatttgttgacaatgtttgccaatttaggacacataaaatgacactgaacttctgagttctcatgtgtgttggcagttaatcatcctccttggttctggcagctttggtttctctgtgcttggttcagtacaggcctgggtctgactgctttcttagcctcagaattctttgggaccagaactttaggaaagtgaggaagaaagagttgccttgctacttgccatcctttaagagctggtggacaaattgcccttcttgggagctgccggagctcctgagtctgaccttgatcaaatcttagtttcaaagggcctggccttatacctggacctcatgccaaaggatggtctcatttttcttgaacccaacacactaaatgtctatgaggttagttgtgtattcaaatatttttattttcttaaagaaaaatatctcaaaaacactaacctgtttcatacaattgcttataaaactttctttcctttctctttcccctgtcttctcttctccctctccttccctgccccatttttttccatgacttctctgaccctggccctttgacatgcttatttccgccacagttcttttcagcgtacctggctctccatttgtctcgtgtaaatagatcgctctccattcctggtgaataaccagggtcacaattgtctggtttgtacccaatgtgacagaattgtaggctgattttcataaaccagagctaccaagcgtttcaaaaacagtcttgtttttgccaagtaaggtgagcaaatataggactaagtttaaacatccatcaggagttatttttgaagtgattgcttctaaatgagaagcatttgaaaatctcacaggtttctttacaagtaaattccgaagtcatgcattttgctggtgtctgctgattaattgcgatcctgtgacaccatgaaaagccctggtggttggttttgtgcagctgtagagaaaagtaaagcaaagcccagtgactttgccagctctttcaggacagtggggattcaggctgaggaaggtattttttccctctggcagtcaccacataagaacagaagctccagccagacccattgctccagactccacgtcgggtggtttgggtccctgcgggggtgtggtgaaggcatgacatttgatctgttgcttctgaaataacagatccattattagacaaagcattttcagtctccacattgggacttgtgtgcactctcctgtacagttacttctgtttagaagaaatttattttgattctctaaacagaaggtgcttggcatgtatttgttgttggtgattgcagacgtctgacccagtaaaacctgccagtctacccatttagggtctgatgactctggattgattttatctggccttttctgtttctcattacccccttccgtatctaactctcaattatttcactattgtcagcccattgttgataggagagaaagagaggaaaacgttgaatctggttacacagaaagaatcattcacagctctagagaaggatataatagggaaagaaaacagatgttattaaaatagactttcagagttcttagtgtgtttatctatgcttactttgccacacccacctcttcctcttgatttagataaggaggctggagactgaaggatttctcttgacttgcatttctctccttggcactagccaaggtcaaaagatctcatttatgcccttgtccttattctttgtctgctatagatttgtactcctcacagaggctttgcggatgtcattgctgaatccagtacatacatacgtgcatacatgcatatacacgagtatccttgtataagtggggcacgtctgcattgctgcattcactcctgacatcgaagggaagatctgctaaaaaaaaaaaacaaaaaaaaccctaaatagttacaaacatcactgcccagtatttgctaaggcaagaattagtttgacctacttctttagccacgactgttctaatgaactcagacatgtaaaccagtttagactctcaaacaatgtatttttctttaaatttaagactttgactttaaaaggcacattttattttcatgtgcgacagctaacataaagatgtttgcatttctttgctgaaatcagtgtataggttgtttgtaactaataaactcttgtggcagatgattgttgggccacagtcatcagttttggggattgtgtgagaaacccatagcaaagtatggattaaggacttgggtttctcggcactgctacatcctccaaaaccaacatgcctttctgcaaagagaccagagctacattctgcaggtgtctgttttctttgaggggaacattttaaggaaacttaaaagggaggaactgagcatttaggaaaaatatattttcacagcaggatttttttttcttttttggtttaggtttttcatttgttgcaagcctactcagactccaaacacggaacgaattcagacttccagcacgagctgactgacatcactgtttgtaccaaagccaaactctggctggccaagaggtatgttaaaatcccacatgagcaaggagttatcaggggttaggaatacatttgagaattgctgtttctagttgtggggagttttaaaagtcattggcatgagttttctaaacttattggagtatttatccttttagaactttgggttgtggtaaagaaagaaaaatattttcttgacaatttttctaaaactgctaagtgactgaggggcatgtaatatggctttttgtctgcccaccaatcagcttgtttttgttgaaacctgctgcgtgcccagtcctgtgttagatattataacaatgaaaggcagtaattgactaaatcatgtggtacagactcttaggtgccgtggcaactcagagattagagattgctgtaggcttgagcaggcactgagggacagatagggtgtgaatagcaagaggggatggaagttgcctttcttaggtgggtagtaaggtagcttgaataagcaaggcaaaaaagaatagaaacatatttttcatccttgccattgttagtttatcctggaacttagaacatttactgtgtgaaagatgaaggagtaaaaggaatttctcatgtaatatacagggagtcctctctgtaatgccatgttcaaaatctgtgttgcaggactctggtggtggtaggatagtgttaactgcaaaggccctccgtaggtcctctgtaagttccaccagagtagctccagaagaggcgcatgtgttagtgttactacctttcctgccatagtacacgcatttaattaagagtcagtttattggccgggtgtggtggttcatgtctgtaatcccagcactttgggaggctagggcagaaggattgcttgagcccaggagttcaagaacagcctggacaacataacgagaccccatctctacaaaacaacgacaacaacaaaaattagccaggtatggtggtgcatgcctgtagtcccaactacttgggaggctaaggcaggaggatggtttgggcccaggagtttaaggctctagtgagctgtgattgcaccactgcactccagactgggtgacagagtgagaccttgtttcaaaaataaataaatttctgatgcttagagtttgagaaacaaacaagttgaaaaaaaaagaaaaaagtatattggctgtctaaagtagaagcctctcttttttatttttcaaaaagtgtgcttttggtcacttttgttgggctcttaccttctgtggcaagtcaagtaatgggctgtgtgaggctctcaaatcagtttaattcaacaaagcattgttgagcacaggctacctgctagcctttgtgttaggagatatagggatacaaaaatataaaagagctagtcctggctccagggacttccaggaagtgagaaagacgtgtataaataattttcatctggtatattaagtattataacaaatgtctgtagtaggtacagcattacgccagaagaggggtgagagagggctgacatcaaactggccatcaagagtgagccagaattttgccaagtggccaacacaggtaggggaattccaggcttaggtaacggcataggcagagacacagcaatatgaaacggcactgtaggtttgcagaaccataaggaagttagccctctggaacctaaagtgtaaggcacaagtggcagagaatggggctcaggaaatatgcccaggccacacagtgaaagctcctgtaagaaaccttttggtgaaggagccagcggtggatttcccaatgtgtggatgtgtgtatctcaattattgtctcaacattaatagctttggatagggatattgatggagaaattatcttgtgtctgaaatgccggtaaagttattgggagcctctcatttttagtctgttagtctattctccctttttttagacagggtcatgctctgtcacccaggttagagtgcagtggcgctaccacggctcactgtagccttgacctcctggggctgaagtgatccctccgcctcagtcccctgagcagctgggactacaggcacacgccactatgcctggctaatttttgtggggttttttggtggagaaggagtttcaacagattgcccaggctggtctcgaactcctgagctcaggtgatccacctgcgtcggcctcccaaagtgctgggattacaggcatgtgagccactgcacccaacttgttttctccattttatttagagagtaggagttgcttacccatgaagtgtttacccacgcctagtaccatttgccttctgtgtggctcttagcatcccaaagatacatatcacatcagtaccctcagctgtttgccaggtaataggccacttcttcctacctgttatttctggggatcaagaagtcagagctgtccagaaattatcctctgaaacctgcttctagccaggactgtcccaagtatcctaacactctagttcttaaagtgctgtaaggaaggagtttctgcccccttagcttgctactccttcatgcatctcgtagaaagtcattatccactggcttcctgagtccattacctcttgttggatgagatggaggagatggagcggcaggccagccattgagtggaccttcatgttgtgcagtgcctgaagatggctgacaaagctgccatcagcttcctctgcagctaagaggaagggaagtcctcctggccttttaaaacctgtcctgtggtccctattgctgttttctaattgggctttccattctcattccctctgctccccaccccacttctgatttttctccatgattttccagctctagaagacaaaggaatgaatcactgcaatttactgggtttccaccttccttgcccagaatgtaggacagccacttttctgtttccagtacagtcaactctctattatccaagtgtgaactttccgctttgtgggtggtctgtaaatggttcctaacaccaggcttccttttgctccccagcacacttttacaagtgttaatcagaatgtgttcagagcctgaaatagagtttggaaggaaaacatactgccagacagcacaatgcattccaaagctatgtatcagtttttctatattatccacatcattgacaggataactttgagggtcctaaatagcaaattatagaactgggtataagtgatgaagcctcggtgtcacatgcctgccctgtccctgaggtcctcttgttctgggagttgtctgtctatactagttaactccatgctcagacacaccccctctcgtcctagcggtcccttctcagaacagacccctgtctttactttctcacctgcctttcccatgaagatattacagtgcagagtattccaaattcaactactgaagaggcttttttatgtccctggtaatttacacatgaaagaaaaataaatgttcctttgagtctactaaggattttctgtatcttttgaatataagctatgaaaaattaatgtttttgcaaagaaaaaaatgttgccttaaattttaacaccgacacccttttccttccctaatttatttgatcattagcctgagtttcttcagtcccataagtacaaaaatgctagtggatatgtatttgtccttttgttctcaaagaaagtttttaaaaaattgattggcactattggataaccaattcagtctttaaattttgactctgaaattgagggaacataaaatgaagacttttgtcctatatttgtgttttgactttgcaagattaatagggatttatatgaggtgattaagcaatagccatggagttgttggggaatttttggtgatgagtggtcagctggcaacatggcttcaggaaaggactgggcttctgctcttacaggctgcttttcattccaggatgtcaaagccttaatggaaatcagctcattaatccttcaagtcctttccttcctgttttcctccactcctcccttcttgatccagtttactgtctaaagcagtttactaactactgaaagaaaactaaactgacctagaccagaaacgaaatgagagtagccgtctagtagggatctgctgctgtcctggaaaggatggcagtgggcatcatgagagaggaatcacccagtctgacactcatgctaattacaaaaacttttttttttaagttttttatttatttatttattttttagttttagagatgaggtctggctgtgttgcctatgctggacttgaactcctgggctcaagcagtcctcccaccagagtcttccaagtaagctgggattacagacatgagccccatgccctgccacccttgctgcttgcagattccagctcagctgtcccagctagatcgcttatttactttggctaagagttgtaattagtattatattaggcttaaacttttcagaagtgaatttggctatctagtttctccttctttggttataaaaggaaaaaaataagtgtgtatgtgtatgtttatatattgcatgtgtgtttcttttggtaaacttagtgaactaaatggactagtcagggctgggtgcggtggctcatgcctgtaaccctagcactttgggaggccaaggtgggtggatcacataaggccaggagtttgagaccagcctggccaacatggtgaaacccaatctctactaaaaatacaaaaaattagctgagtggtggcacacgcctgtagtcccaactacttgggaggctgaggcatgagaatcgcttgaacctgggaggcggaggtttcagtgagctgagatcatgccactgcattccaacccgagcaacagagaaagactctgtctcaagaaaatgaatgaatgaatgcatgcatgcagtggatgtgataaccagaaataaatatgtgccctactaaaattttttcaccgttttccccttcattgttgtgtgctgctatatgcttatcatagaaaattagtcaagtacaaaatttggaagagagtaaaagtctattcttaccacaatccataaatcactattattggttaagagttgtatgtaattccttcatcttttttcctatgcttttttttaactttgtcaaggctatactgtatatgtaagttatagnnnnnnnnnnnnnnnnnnnnnnnnnnnnnnnnnnnnnnnnnnnnnnnnnnnnnnnnnnnnnnnnnnnnnnnnnnnnnnnnnnnnnnnnnnnnnnnnnnnnnnnnnnnnnnnnnnnnnnnnnnnnnnnnnnnnnnnnnnnnnnnnnnnnnnnnnnnnnnnnnnnnnnnnnnnnnnnnnnnnnnnnnnnnnnnnnnnnnnnnnnnnnnnnnnnnnnnnnnnnnnnnnnnnnnnnnnnnnnnnnnnnnnnnnnnnnnnnnnnnnnnnnnnnnnnnnnnnnnnnnnnnnnnnnnnnnnnnnnnnnnnnnnnnnnnnnnnnnnnnnnnnnnnnnnnnnnnnnnnnnnnnnnnnnnnnnnnnnnnnnnnnnnnnnnnnnnnnnnnnnnnnnnnnnnnnnnnnnnnnnnnnnnnnnnnnnnnnnnnnnnnnnnnnnnnnnnnnnnnnnnnnnnnnnnnnnnnnnnnnnnnnnnnnnnnnnnnnnnnnnnnnnnnnnnnnnnnnnnnnnnnnnnnnnnnnnnnnnnnnnnnnnnnnnnnnnnnnnnnnnnnnnnnnnnnnnnnnnnnnnnnnnnnnnnnnnnnnnnnnnnnnnnnnnnnnnnnnnnnnnnnnnnnnnnnnnnnnnnnnnnnnnnnnnnnnnnnnnnnnnnnnnnnnnnnnnnnnnnnnnnnnnnnnnnnnnnnnnnnnnnnnnnnnnnnnnnnnnnnnnnnnnnnnnnnnnnnnnnnnnnnnnnnnnnnnnnnnnnnnnnnnnnnnnnnnnnnnnnnnnnnnnnnnnnnnnnnnnnnnnnnnnnnnnnnnnnnnnnnnnnnnnnnnnnnnnnnnnnnnnnnnnnnnnnnnnnnnnnnnnnnnnnnnnnnnnnnnnnnnnnnnnnnnnnnnnnnnnnnnnnnnnnnnnnnnnnnnnnnnnnnnnnnnnnnnnnnnnnnnnnnnnnnnnnnnnnnnnnnnnnnnnnnnnnnnnnnnnnnnnnnnnnnnnnnnnnnnnnnnnnnnnnnnnnnnnnnnnnnnnnnnnnnnnnnnnnnnnnnnnnnnnnnnnnnnnnnnnnnnnnnnnnnnnnnnnnnnnnnnnnnnnnnnnnnnnnnnnnnnnnnnnnnnnnnnnnnnnnnnnnnnnnnnnnnnnnnnnnnnnnnnnnnnnnnnnnnnnnnnnnnnnnnnnnnnnnnnnnnnnnnnnnnnnnnnnnnnnnnnnnnnnnnnnnnnnnnnnnnnnnnnnnnnnnnnnnnnnnnnnnnnnnnnnnnnnnnnnnnnnnnnnnnnnnnnnnnnnnnnnnnnnnnnnnnnnnnnnnnnnnnnnnnnnnnnnnnnnnnnnnnnnnnnnnnnnnnnnnnnnnnnnnnnnnnnnnnnnnnnnnnnnnnnnnnnnnnnnnnnnnnnnnnnnnnnnnnnnnnnnnnnnnnnnnnnnnnnnnnnnnnnnnnnnnnnnnnnnnnnnnnnnnnnnnnnnnnnnnnnnnnnnnnnnnnnnnnnnnnnnnnnnnnnnnnnnnnnnnnnnnnnnnnnnnnnnnnnnnnnnnnnnnnnnnnnnnnnnnnnnnnnnnnnnnnnnnnnnnnnnnnnnnnnnnnnnnnnnnnnnnnnnnnnnnnnnnnnnnnnnnnnnnnnnnnnnnnnnnnnnnnnnnnnnnnnnnnnnnnnnnnnnnnnnnnnnnnnnnnnnnnnnnnnnnnnnnnnnnnnnnnnnnnnnnnnnnnnnnnnnnnnnnnnnnnnnnnnnnnnnnnnnnnnnnnnnnnnnnnnnnnnnnnnnnnnnnnnnnnnnnnnnnnnnnnnnnnnnnnnnnnnnnnnnnnnnnnnnnnnnnnnnnnnnnnnnnnnnnnnnnnnnnnnnnnnnnnnnnnnnnnnnnnnnnnnnnnnnnnnnnnnnnnnnnnnnnnnnnnnnnnnnnnnnnnnnnnnnnnnnnnnnnnnnnnnnnnnnnnnnnnnnnnnnnnnnnnnnnnnnnnnnnnnnnnnnnnnnnnnnnnnnnnnnnnnnnnnnnnnnnnnnnnnnnnnnnnnnnnnnnnnnnnnnnnnnnnnnnnnnnnnnnnnnnnnnnnnnnnnnnnnnnnnnnnnnnnnnnnnnnnnnnnnnnnnnnnnnnnnnnnnnnnnnnnnnnnnnnnnnnnnnnnnnnnnnnnnnnnnnnnnnnnnnnnnnnnnnnnnnnnnnnnnnnnnnnnnnnnnnnnnnnnnnnnnnnnnnnnnnnnnnnnnnnnnnnnnnnnnnnnnnnnnnnnnnnnnnnnnnnnnnnnnnnnnnnnnnnnnnnnnnnnnnnnnnnnnnnnnnnnnnnnnnnnnnnnnnnnnnnnnnnnnnnnnnnnnnnnnnnnnnnnnnnnnnnnnnnnnnnnnnnnnnnnnnnnnnnnnnnnnnnnnnnnnnnnnnnnnnnnnnnnnnnnnnnnnnnnnnnnnnnnnnnnnnnnnnnnnnnnnnnnnnnnnnnnnnnnnnnnnnnnnnnnnnnnnnnnnnnnnnnnnnnnnnnnnnnnnnnnnnnnnnnnnnnnnnnnnnnnnnnnnnnnnnnnnnnnnnnnnnnnnnnnnnnnnnnnnnnnnnnnnnnnnnnnnnnnnnnnnnnnnnnnnnnnnnnnnnnnnnnnnnnnnnnnnnnnnnnnnnnnnnnnnnnnnnnnnnnnnnnnnnnnnnnnnnnnnnnnnnnnnnnnnnnnnnnnnnnnnnnnnnnnnnnnnnnnnnnnnnnnnnnnnnnnnnnnnnnnnnnnnnnnnnnnnnnnnnnnnnnnnnnnnnnnnnnnnnnnnnnnnnnnnnnnnnnnnnnnnnnnnnnnnnnnnnnnnnnnnnnnnnnnnnnnnnnnnnnnnnnnnnnnnnnnnnnnnnnnnnnnnnnnnnnnnnnnnnnnnnnnnnnnnnnnnnnnnnnnnnnnnnnnnnnnnnnnnnnnnnnnnnnnnnnnnnnnnnnnnnnnnnnnnnnnnnnnnnnnnnnnnnnnnnnnnnnnnnnnnnnnnnnnnnnnnnnnnnnnnnctcactgcaagctccacctctggggttcacgccattctcctgcctcagcctcctgagtagctgggactacaggcgcccgccaccacacccggctaaggttttgtatttttagtaagatgggatttcaccatgttagccaggatggtctcgatctcctgacctcatgatccacctgcctcggcctcccaaagtgctgagattacagatgtgagccaccactcctggccctttttttttttttttttttaaagtagagacaggggcttgctctgttcccaggctggtttagtacccctggccttaagtgatcctcctgccttggcctcccaaagtgctggcattacagacatgagccaccacactcagcccagtttttttaagttgaagcttaaatagaataactatccctgtattacttcattcaacaaatacctattgagccctgctgtatgccaggccatatcaaatactacaactgtatattaaaaccactacttcagtgtaaagagagcaacagaacagagtcttatcaaatcgaatcattgacctagaattttagaactggaaggaatctcatgaagtttattgtattaagagtctactctcacccctgtacatgtggagtactacagcccacagaggctggaggatttatccgttttcacacagttcaccagaattaacatcctacctgacaactactatcatttgttgagggcttagctcccggcaccttactgggctctttgtacttgaccacactgcctccatctatccagtgtttttatgtgagggttttgcatggcagtaatttaagccttctctagaacagtgattctcagaaagaaaatgtgcacgtgaatcacctgggaatcttattagaatgaagactctcattcactaggtctgggtggagcctgagatcctccattttgaccagctcccaggggacagagtacgtaccttgaagagccagggtcagagtgccaggctctgtgatcttccaactcccccatttgaaacagtcccatccccattgcctcattctcaagggcttgtggctgagcttggagctacaggagagggctgaggctactgaagggatcagcccaagattctctccctacccacctgggatcacctgtgttgaggggcttcatggccccagggctctctatgggaaatccatactccgttgtctgggccgccatcccagtggcctcagtgccctgtatgggaccagtgttttttttgtttttttttttgttttgagacggagtctcgctctgtcgcccaggctggagtgcagtggcgcgatctcggctcactgcaagctccgcctcccaggttcacgccattctcctgcctcagcctcccgagtagctgggactacaggcgcccgctaccacgcccggctaattttttgggaccagtgctttgttggcatgcagtgtgtttatcatttttaaaaataacagtctgatattctggtgagaaaaacaggctctcagaaatacaagaccaggttccaaggttacaaggaaagcaaccttgggaataaattttttgcataaaacagtgctgatgaggggaagagatggtagagggagctaatgtttgttgaaagcctgctcaatgtaccagacctaatgacttgctaccccaagttaattctaataatctatccacttccctgtccagctttcctgtaagtgcccttcacacccccatgcagtcctccatgtgccctttcatgtgtgcctcatctgcttctccatccccctcatccatactccagtcactttcctgtctcctcccctgtcaccccctatccatactcccatctattctcctttttctgtcttacttactggaccccactgagctgagtggtgtgctcctgaagggcctgtggatttaagtgtttaaggaaaatatgcttatagagacaaagctgaggcttttgtgtggcaatcccagttcttccctagggggtctgtggctaactgcagaagttctggtttaggattctattttgctttacaacagctgaaaacagcatttattttctcaccaccaaatttattcacacaagagacttacacttcccaggcagaaatactgggttttaggtctgcttccattttcccactgtcctttagctccttcccaaatccctcatgggctggtcccctcctgaagaaagagatccttcttttgcaatgacttgaaatagaaagaggccacagccttttgccacagctgcaagttgctgtttcacttccatgccgttgaaatgaatccagtccaggatgattgttaaaatattcagatgatcatgtggcattttaaggctatcatttgtggtccgtgccaaaactttaagggaagcaagtcttaacagggatcgctagccacagagcaagtttccaggcattgctaggggttatgttttgccttttggtttgtttcttttctttctctcgttttttcttctttctttctttccttctttttttctttcaaaaaaaaggatcctcctttttttaattttagaaaaagttattttttttttttaggaaaaaaatggaagaggtagtaactgcttttcaattcctagattttactggaagagagaggttctcattaggacccgtctttaatcctccagcacagcttgttcaaagtcacatgagcctcatgcagatttgaatgatgagagaaatgaagttggtatattttaaacccaagcatgctgacatatgttcacttccctttcagacgtctcaggaatgtctaaggtcatgatatctccggatgagatcctgtttgtgttttttaaatacaaaaggaaacattatcgtatttcaacccaagccagtgggacaaggtgcaaaacattttcttcattaaatatcccttttacaaatacagcctcaagttttaaaggaataagctgtttgaggaagagtgaagtttgaaaatatatgaagtatttcttgttgacagactgagcttatggaaacgagtctgggtgaaaacagtcagaagtgatcaatatattatcctgggcccttgagcaagtcgtccaagatcaaagcttcttcataccgcagcgagaaataaaaatagtccttttacgcaactgcacacacaccaagaattcaacccccaactgctgatgctttctactttttaaatatagaaatctgcaaacctaacctggagatggcagttagttcaatagagggctcagaaatctctgtcttgttccacttgtagctgttggcttactggggtgttgctgttggaagatttggacaatgttgtcattgctcagcttgcaagggagtgcaggctttaagtgtcttcagcacattctcataatattatgtaaagccctaatgtagtgggttatgttttttcctttagcatgtaacatcttccatcttttggataaattaacacctttgttaccttcattgagccattctcagtcaattaaagccaattcagagtcacaaatattacaagacaatggtttaggcacagtgggaaatatatgaatgaacgataattgtctctgtttcagaaaccccacaagtaagacaagtatggatttaaataactataaacaagattgtgtcaatgctagaattagtcaaagtgtgttgcagaagcagagaagggagaaataaatgccagcttgtcagggtaggggtgtcaaggaagtcttcaggaagagggagaagtctttaaaggataggtgagtttaattattagataaggttaattttttagcatggtggcatgggcctgtaatcccagcttcttgggaggctgaggcacaagaattgtttgaacctgggagttggaggttgcagtgagccaagatcgtgccactgcactccggcctgggtgacagagcaagattctgtctcaaaaaaataataataataagattaattgtctcagattggagactgagtaaagttacacttgtatagtacctttgttgccaagtaaattgtgaaggtctcattgcccaagtacacaaaaggtatcttagtacagcgcccagcattgtgggaacctaatgtgtgtgtgtgtgtgtgtgtgtgtgtgtattagatatatataatggagtctttgttgtcagagttcagttatggttgaatctaaatgaaaatttagacagtgaaatacatagaagtacatacagtaagtacaagagttcagaaaagaatgtggactaagatagtcaaggaaggccttatcagaggagttagatatttgagatgggcggtagagcagagtgtgatttggaaacaccaaaaagtggtaggaaaagagcatatcaagatggtggaccaaatgtgcagtgggatactggagggagtgcatgtgatgtatcatgggccagtgaggagatcaagctgagggaaagctgctgtgctttagagagcagtgcaagatttgataagagaccagttgtggaaaccctcagatgtcagccagaggaatatggactggatccaggagttaagaggaagttagtgagctctggctgacactggtaagtaggctgctgtctatatgcacatgaaatgcactaaatgctttacatctttccaacctcgcttagtggtcatcagagtttctagtctctcttaaggattaacagaaatctctctattagcagtccttgtcacctggaagcccctgttgcctgcctgggcagctagtaataggaatagagatatctgtatgcacttgagaccacataggttttgtctttccaatgttgctaagagtaccatagaaccacagaatttataacagtaaagggaatttagagatcgtctaatccagtggaattcattcttcaaacaagcttatgtggaaattcaagatattgaaaatagtagagatggtttcaatatggtctaaactggggtgggggcccggagacccacctgcatggcttccttcctgttggtagccccagaagggactaagagaagcaccctaactccctatttcaaaacagtgatctaatctaagctgatatttgtagaagaggtaatagacacgggggcaggcgacttcttcctacttgaaagatatggctgtctcagaagatggctcaaattagggatgtaaatagcaagtttgttttttgcctcttgacctgctttcttcctctcccgaggcctgatcatccttgtggaaaattctacaactccatgtccttgggctgccaagggccctctcttaggagctgccttccatggatagggcttcatgctccagaccttcttgccatcaaaacttaactattctatatcccttttcctcactctcagctggctggctgtccctaaattttaatatgtaaataagtttgttctcccgggtcacacagctgttttccagtagtgacctggtagagacagcacctttaactgaagtccgtaactgacgcaggctttacggcagtgcgctggcctggcaggagcacatctgccctcatattaagctgctcagccctgatacatttgtcccgtgtggctggggtttcggccacctccacaagggctgtgggcagcatgagctggtcttacatgaatgggccaagggagcatcttggagagaggccctcctaagtctcactagcctttccttcccctcagctgccagtgatgatcaggcttcctcagcaattagactggcctgggtgcctctgggaataacaccttcccacgcaagctcaggggctcactctaggactccccaagccagacgggtcctcaccagtccgcaggctctgcgttcctgggtaaccacaaggagagtcacatctagaggcacttggtgaatggaaagcctctagccagaaaacacagtgcagtgccattgaggagaggcagagaatactcaaggttagcaagtcagtggtctggcctctgctggactactgcccagcaaggtgtggcctgtaatttccttaggcctgagttttcatctgtaaagtgggaagctctaaaatgaaggtgtgaaatagaggagaccaggggagggcatagtgagtaatggaagtgtaaacataaaagtgctaagaagatacgggaactatctattgtcaaataacgaagtctctatcaacataatcgccacgttgaaaatgtgcctttatgctggtcctcacagaaacagctgcacttggagccttgcttttcaccagactggctaccaggatataacaccagtctacgtggtttctaattgcttggcccaatgtctcacttttcacctgattgtgtttgggacacatagatacaatttgttttctagaaaaccttgattctattcttggtttctgcccttgtcttggctaggtcacttgagctactttgttgatttataaaaatgggaatgataatttctatttttcttccttcttaagaattttataaagataaaataagaatactttttaaagagaaaacttttaatataataagatgttgatattgttattatcattcgtactatttttaccagggctaatttccaagtgtgtgccttgccaaattcacatgaccacggtcctattgacggtgctgttagaaattctccccttgtgatttacatagctcaggcagcatccagaagatttcatccacctcacctatttatccttttttatgcttttagggagaaagtaaggtttgaaaagaaaggggacttgtgttaacattctatataagatttgaagctatatatcttccaagccccaaactgtacaataaaagttttcttggatactacttttctcccataattcctagcacatagtttattaagttattaaccagcaattactctggcagcatattaaactttacttttaaacaagtcacagagggagggaaacacgcatctctcgtaaaaggaataaaaaacatacaccctctaaaacagtttccccaggctttgaacaaatcccaagccccacaccaaggtctctttttcatcattctccgcacatagcttgagtgttagtacagtaatgagaacaagatgcctaatagaaagatggaaaaatatgaggattctggaggctccctgggggctctctggaaaggcaggtgattaatattaggagggaaaggcaaaggcatggcattgaagctgtgggcttcctccagcagcagcaatcctaagggaaacagaggaggctgtggctttggccctaacctaaaaagaggaccccagtaccttttgcagactgctggggccttgctgaatgcctacccagaaccctggtaggagtgggtaaggccctctgctttcacagattacattccccaggatccaaacctgctcttccagggaaagcccactgtgctctgcaatgcatagctggaccttcagtcactttctggacagactaacagctcacggtctctcactttgtgcatggtagctcagtaagaattccgtataagttggtccaccaccagagcagggcatggaggatggcttcactttaaaaggaaaatccaagtaggagggctgtggggcagcatctacatatggctgtgagtataaacactcacaaagctccagaccaagaaaggcaggatggatgttggggcataccataaaaatgcagctctgccgtcacacctcccccagggagggcaaggtaaacgagcagtcctggtagccagccaggccctacaagcttctgccagctggccctgcatgcacagctaaactctccatgttacagtgggggaaatgacttgtttaaatatatatattctacagttcatcaccattttgcattttgatttaaacaagtcccctattgtttgtctaagagtgccatatgatggttacttggctgggggccatggtaaaaattggaaatcggaatggcagatgtgggttctttttatttaatttatacttccacatttacatggcttaatgtggcctccatcaaaagaagtacctcctaactcatatccacaggatatagccaaatataaggagaggcagtatctggtccatggacagctgttacaatgatgtgaagtgctcaagactacaaagatggccagtgggatctctgggagaaggggaagctcaacaaaatatcctgggttcagacagccattcagcgtatcctcagaggtagttgtctggatcattagaaaagtaatcctctagaaatagaggaggggctttgaagtgagttggtttttaggggggtttgttgttgttattgctgtttgagataggatctcactatgttgcccaggctggtcttgaactcctgatctcaagcaatccttccatgtcagcctccagagtagctgggattataggtgcctgtgccacctaaacccagcttgaagtgaattttaaataaagggcaggaggcgggtagatatgtgtcaagtggagggatcataatgggatgtggaaacatgttgtagactaatttcccctttttcaaccattttccctctcccattcttctaaccaccccccctctttacttctccccccactccccttctcacctgccttctctccctttgcctctcacccacttttcctcttaacctggtttccttctttccagcccgttatgggcctgctggtggtccctaggatattgcttcattaactccagtgctggctccatgacaagaagcttctagtacttcttgcttattgtggttgagaacagaagtgatctgagctgcttaaataggagctaagataagagaactaccccagatgggctgggatgagcctgccagctgcacctgtttgattttttggaattccttctctttcaccagctcaaacccctccaatgcctctagagccttcctccatgacaatcatgacaatcaaatcaatcctctgtttttatgtgtatttttttctccacatatacccctcccccaacaagatcataagctctgcaaagccataaccttttcctctccctccccttcccaccccatgtaggatatcccccgtactgctcagtaaatgtttctgtattaataaagttaagccatgtgtcttagagaccttaacagacagtagcaacctaaagccaaaacagcagtttccagccctctgaagatggcagtgaattctggtagagcttggtaagtccaaagtgaattccctctctcttccagggagcccaccaaggcttcacaatattgagtggggaccccagctgtccagtgtgacttgagcttatgggatcccactggggtcttcattctttggaacttttagagctctgaaagactacttctgtttcgggcccctgttgactcatcccatatcatttcctgctaatcccactggccatctttctagtcttggcagttcacatcattgtaacagctgtccatggaccagacactgcctctccttatatttgattatatcttgtagataggagttaggaggtacttctttgatggaggccacattaagccatgtaaatgtggaaacataaattaaataaaaataacccacctctgccattccaattcccgccccccataccattgtcccttttagcacttgttattctctaaacatgtcatgtccccaagtctttggacatgctacttcctctgttgtggtcactttgcccaggtctacctcctccccattctccaactctctgccaaggcccttcctgactcacccagacaaacagttactctgttaatccctccttttggggcacccatcatactctagcatgactggttgtgtgttttcccaactacactagtggctttcaagtgtttttttttttttttttttgacagacattgacaacaagaaacagcttttacatatgacctaatgcatatgtttgtgtgtatatactgtgcacacacacatgaaatcatgcacagtcggaaattttagtagctgcgtaagatataaattgccaaaaatgcaacagagagggaatttgctcaagatagagcatatttaatttcaggaatgtgtgctttcaagatatccactgccattttggatacaaagcataaccctattgatgccattcagtataatgtagggtagcttattacctggaaaagaaaaagaaaaaagctagaccagtcaattattttacttaaacttgttgcattttaatggttatttaaatcttaaagataacttattaaaaattattcttagcaaggacttaatggaaagctgatacataacaaaaaccttagtgaaacaatcccttgggaaatctctgaacttctttaaatctcctgccctctgtccttactacactactttgatacactctgattatattttcctcctttctccctctgtcttcctcctagctccttttctcccttcttcttctgcccccatctctctcctcttcccttcctccctccttcccttccttcctttcttcttccttctttctttccttcctttattgctggtcactacccactagttgatttcataacctaacatacatttggaaaaacactattcaggactctaagttccttgagggcagtgactgtgtcactgaatcacttcatcttcctatttccaaacccaccactattcctggctctcagtagcctcttaataaatgtttcctgaatgaataggcctcagttaaaaacaaaacaaaaccaaaaaaaaaaacctgcagccactgggattccggaagggacaggaaaagtgaataatttatcacagacttccccaagacttctgctgtcctctagacactggggcttttgtggacgtgtctgggaagccctgccctctgcctgccttgtgcctctcccaacttccaggagagagggcaggagatttaaagaagttcagagatttcccaaggcaaaaacatattaatcaagttcttaagtggatatttaaaaggacaaatggtaaaaaagagtggaagaaaacaggattcttaacagggccttcgtttcatcttctgtatgtcaacttcgtccgcatagtgctggattccttctcctccttcgaaagccactagtaatgctgcttttcagtgcatctgctacatgctgatcacttctgattttttttgagcactataaatcttcattatgctgtgctccatgccaggatttttccatttgggggtagaaaaattccccaagcccaccaaaaccctgtggcttagtttcctgtccagctggcgtgctgctcttcgggattttgttcccatcatcaaagtggcttgacagactgagaacaaacctctggctcaccctgaacttacagtgcaccatttccaagtcagaacaaacaccaagtaatagcaagagaaaaagaatgaaaaaaattattttcctgacttagaagccagttcagagtgaagcccaactctgtgactccagacagggatgttataaggccttggctgtcctcaagggtggagtcatgaacagtgggctccgggctggaatttcactcagagtcatctcaaaggagaagccatggatggactcctttgtggccccaaatcttctgtttcctggaatccaaagcagcagcatttgagggagcctcccatgatcttgttgactacatcacacttggccccaagcctcacagttgtgggagcagtcagtgattcctgaagtgtcccaggaggccagtaaggtcaccagcctgtaccgggtctagggaagatgcagaacacttcagcctggcagaaggctctaaagatcgtcaacctttcctctgttcattttgaaatttttaaaaatatgctaacttagctgaaaatctcatggaaaccaggctcctcatcagacttgaaagtcaaaccggtttctcaacaacttctctttatggttctgtatggctccacagaaaaccagaaaaacatttggggcaagaagctatgactctgtgaggccacatgggagcaggcagtcaattattacactaaggaacacccagttagcatgaagtatcccatcacttaaaagcctgaccagccttcctcttgtttccaccttatcaacgcattctcttatcttcccaagctgccgctccttggaactggagaagccaaatgaattccctctcacatctcttaccctctttccaaatgcccttccttatcaactttgtctctaaattcttcccatcttacatggcccggttggaagtataacttcatttctccagtccaccctggtgggttggtgggttggttggttggttggttggttttttgggttaactccttacatcctattctgaagtttgtctttgtttttgtctccaaaactagtcaaaattctcaggtcagtagccgtctcctgtgcatgtcctccctgcacctagctcaaggctggatgcacaggagacatcctatctgctttctcaggccactggctttcctccctgaatggctcttgctttagcagggggcagtctcaactagtagaaattttaccattgggaatgatatcaatgaagtttttatagactgtgggctttccatagtggatggaagagtaacagcagaaagttacgattgagagtcccagggtaaactagagacaaaagataggggcagggttaaaaagtagaaccccaggctagacaatataacaagaccccatctctacaaaaataattttaaaaattagctggatgtggtggcatgcacctgtagtcccaggtatttgggaggctgaggtgggaggattgcttgagcccaggaggttgaggctacagtgagccatgatcatgccactgcacttcagcctgagcaacagagaaagaccctgtctcagaacaaaacaaaacaaaaaagaaagaaaagaaaatgaggcaaatctctatgttcttaatagaatggtatccaaaacatattagtgaaaaggagtgatgatcagaaccgagtatatagtaagccatcatttgtataaacaagtgggtagcagatagatgcttataaaagaatagagcctggcgcggtggctcacgcctgtaatcccagcactttgggaggccgaggcaggtggatcacgaggtcaggagatcgaaaccatcctggctaacacggtgaaaccccgtctctaataaaacatacaaaaaattagccgggcgtggcggcgggcgcctgtagtcccagctactccggaggctgaggcaggagaatggcatgaacccggcaggtggggcttgcagtgagccaagatcgcaccactgcactccagcctgggtgacagagagagactccgtctcaaaaaaaaaaaaaaaaaaaaaaaaaaaaaagaatagaatgtgcttggaaggatatgctagaaagtagtaatagcggttgcctcgagaacagtatatgggcagggggtagggttgtggaaaagggatttcattttcattgcgtgtccttttgtgctttttcaattatttttgcatgtgttacctatttatttatttatttttgagacagagtctcactctgtcacccaggctggcatgcagtggcatgatctcagctcactgcaacctctgccttccaggttcaagtgattttcctgcctcagtttcctgagtagctgggaatacaggcgcccgccaccctgcccggctcatttttgtgtttttagtagagatggggtttcaccatgttggccatgctgatctcgatctcctgacctcaggtgatccacccacctcagcctcccaaagtgctgggattacagacgtgagccaccatgcctggaccaccagcacactcttaaccagcctcttgtttttcagtcttaccccctgtaatcccagctacttgggaggctgaggcaggataatcacgaattcaggaggtggaggttgcagtaagccgagatcataccaccacactccagcctaggggacagagcgagactctgtctcaaaaaaaaaagtatctgatacatatttttcatgttagacatacaccagctccagatataggcaattcaggatagaggtgtgaataaactttaaggaaattgtaaaacttagtttataggaaatgagaaggatggatttcaggattaagccacatggaaactcactagccagaacacttgtgccaatatcaatgccatcccctaatcccatgttggaagtagagaagggcaaggaatggacagttctggaacatctgccatggccaggcactgaggtgggcattttaagtttactgtgccacattgaacactcacagtgactcacagtaagtctgtcttagtccattttctattgctgtaacagaatgtatgtattgtatttattgtaacagatggcactggcatctggtgagggtcatcccatggtggaaggctgaaggcagaaaagagcacgcaagacagagaggaaatcaagccaaactcatctttataacaaactcagtctccaaatcactagcccaatcccaagataacaacattcattcattcatgaggacagtaccctcatgacccaatcacctcttaaaggctctgcctcttaacagtgttacaatagcattacatttcaacatgaattttagcaggggcagtcaaaccatagcagaggtgataatacagttcccattttacaagtcaggaatctgattcaggtcacagagattgtaagtgggaaagccaggactcaattgtaggtctgtccctactgtctctactactcacattgtattattagtacaccaaagacgttttggccttttcatggccaaagacactcaagagtcaaggcccttcagtgctgttcttaaaaagaaagtctttcttcatccttttgtatatagatacccaaatctgagcccacttactatttctactatgttgttcaaagagctgctccatatattgaatgaagaaaaaaatccatttattggggaaaatgtcatctccagtgtttgttaatcttgccatgtgtctattgttcagctggttatttcaagtccacagatacagcttttcatatgtgagtgtaattttccttctccacaatactaaatctgattttcatgactgattttttttcccccaaatttctatacttaaaaatgtagaataatagagtaccatctccccaccccttctgtcccatcttattttcaactaactaagataggatcttggtgtttgttttcattttattttatttgaagccagagcatagagttgttatctattttgtctacacatagccttggcctccatcatatggtcaaggatttcatttgctcacattagttgcttattttcttgccatcaatgattgtacatcatttcttaatatttgccatagctgcttaagccccatcatataccatagaaaatacccatgttctccttcctgagacccagacctaagggagagaaaatctcaatttatattctgttctttacctttctaggcaaaatccatgtttggtgaccagagctgtatatattgatattctcttcctattgacttgctgcctcaacagatctgcaaaggacaaccagccaggtatgattcatagttatactgtattttggaatcgttacacatctttgaaatgtggatggcgttttgagtggctctgccacacactgctccaccttctacttttgtaagactaaccacacatcaaaattaaacagtgtcatatagttccctcatagaagtttgtcagggaaacttgttcttgtttatttggaagtttgccgtttattttctagttggtcattcagggaagagtgaactctactcagataccctctctgcatctacgaccccggcttttttctattttatgtattttctttgaaaggtcattattttgaatagctgtgagttcattctgttccattctgtggagataactgagctgggctcatttgatgctgggtatttgagactctcttctcaaatcgacccctacaccaatgcacttatgagttgctgcctcagactctgactttccacatgtttcttggtcatgtaagtttctggggatggaccccagatccacatacagttgctctattttaatcatgatttgcaaagtggtttttcttttttaagggaaaatggcaactccaaataaaatttttttgatgtgtttatataagaggctacaggaagtgctgtacatgaattccaggccacggactgaaactgattttcatcagcacaaactggaatgcagggtaatgagtctgcaactggttaaaatcagcctcttctaattgattaggcctgtctaaaggaggctagaattacaaagtcagattctgagtgcaagcagaccaggcctttcctctgttacatttagtctgtcaatgatttgttgtcttcggtaaatacattcaggctgtcaatgttcagctctgttcatatggaaccctgttcccaaattcaaaccaatttaaaatgctttgcaggagggaggtcggggaggtgggagcatgcaaaaccgtctcacccagatcgatgtatattagcccacaaaacccctgtggccatgcagaggtaataagaacgtgctagactctcatcaagtccacatccctggataggagtagctgttgtatcctctttgtagtgtaaaatcatatggttttatagctataaagcaatcccagtttatgcctcttatcccagcataattattaatagtgcgcccttttactcttgaaagtgaccaggtttgcataataaattactggtcaccgtggctgtaagggaccacagagttgcatctactccagcttacccttaagtcaactggagtctaaagtttaaaaagagactatgaatccaatgttaccaagtaaattgctttagatttccaccatttctgtatttcagttccaaattccatatagctttgtaatacttccctgcctatgtatctaaagggctttggccataagagatttgttcattgcttacaaatctactcactgggattctggcagtttatggttgactataatcattagtttatttgaactgagtttttcttggctcagtgccattattctttgtctagaatggttaatccttatatgttgtaaaataccttctttcttccccaactacccatcctttactgatgagctgggttccttgaagatgactttagcttttttgaaccatccatttctccaagctgttaacattatttagagtttataccctaattaaacagatcacagcttgttttcacaagctgtgtttaataacttaacagtatttcacttgcatctatatattactcttaaagatgttactctacagagtaagatgtgaggacaggatgcttttattctagtatgacaaccatagctctaaaaattttgtcctgcactatccaatactgcagccactagtcatatgtggatcttgagcgcttgagatgtggttggtccaaaatgagatgttttgttagtgtaaaatacatactacatttcaaagacttagtatgagttaaaaataaaattcctcaataattttgtattaattatgtatgtgttggaatgatgtttttgacatactggattaaatttaaaatgtattatcaaaattaattttacccgtttcttttactttttaaaatgtggcaactaaggtcagatgtggtggctcaagcccataattcagcactttaggaggttgaggcaggaggattgcttgaggccagaagtttgagaccagcctggcagcatagtgaggcctcatctctaaaaaaaaaaaaatttaattagccacatgtggtagcacacatctgtaggcctaggtacttgggaggctgagacaggaggattacttcaacccaggagttcgaggctgcagtgagctatgatcatgccattgctttccagcctgggcgacagagcgataccctgtctcaaaaaaaataaaataaaataaaataaaatatggcaactagaatgggaaaaataacaaagtaaaactgtcattgaaatatatgtgtttaactttgtcaaatggagagataggaagaattgtaaatgacatcataacccaaaaggtacattacagtaacattattaatgatgaagaatgtggctgtttacattttaaattacatatatatgactcatttttatcagacagcacaaattttattcagtcctcagggaattgccctcataaaatcgctagatgtgtttgtatttatgtatatgtatgaatgttcatgttcatataatacatccacacaaacagtaggagcatattttctttctttgaggatggaatagatttttagaaataaccaaataccaaataaaatggcaattaagatggaaagcactgtttgggataaaaataaactgtgcttaatgtagtgaagtctattcttgtgtgttttataaattgttccccaaaacaggttgagcaatagataaatatatcaccaaataaggtgatcacttacttggatgtgtagatttcaatatgctttcaaaataatgtgatgatattatagttttagcatataagctccttgaaagaatggaccatgtcttagattctttgtcgtctaagcacatagtaggccctcattaaatggatttattaactgtttgatgaaatgcagttctcctcagtttttagaatagtaacagctgttatcaaaatacagattttatttaaactcatgtatcaaatagatgtgaattcattttctgaattcaagcaaggtgtttatgtgtgtatgtaaatatatatctgcctccattattagctcacaaagtccagagtaggaagtataccacatagactgaagccaaacctctgggtttgaatcctagatctgccatttactaactttgtgaccttaggcaagttatttagctgctttgagacacgttgtttccattgtaaaaggggacagtaagatctatatcttagagtggttgtcagcttatacatgtgaagctgtctgtgaagaatgtgctttgcatggcacagaataaatgctcaataatattaactattattaatatttttttgttgacatggagtttcactcttgttgcacaagctggagtacaatggcacaatctcagcttaccaaaacttccgtgtcccgggttcaagcaactcttctgcctcagcctcccgagtagctgggattacaggcatgtgccaccacgcctggctaattttgtattcttagtggagacggggtttctccttgttcgtcaggctggtctcgaactcccaacctcaggtgatccacccgcctcggcctccctaagtgctgggattacagatgtgagccaccgtgcccagcctattatcattattattcgctggaagctatgcatctaatccagtctcctccagccgtgcagcattgtgttcacctcctcgccttcactgttctcatatttttaaacatcttcaggaaagaagaaatgcctgctttcctaggaaaacactgcagtataacatacctggcttagaatgtcaggagtccacttgattagggttgcccctgtccctctgactgatccagaaaaagatcattttttttcttgtttatttattttttcattcatcagacctgctagcctcagagatatattgagcacttgtatctggagatagagatgaatatgccttggtcttataagtaggtgcaatgaaggatttttcagatgctgtattaaaggaagtatgtatgggacacatttgaggcactaaagaaagatcatttctacttgagaggacaggaaagacttccttgaagaggaagtggttgaacagagttttgacagtgggtagggattcaccaggatgggcaaggtggaggtaggtattacagacagaggtagaagcatggccaaagctgtaagggcacaaatcaagcacagccttcagagcactagggacatggcaactggggtgttgggttcaaggccaggcaggtgtgactggtgaggctgaggaggcagaaactcagtcatggaaggcctcattcacaggccaaagtccaaggagcctcaatttgaccctgtagacaaaggagttcattggacgatctaagacagagagtaggactgtgtggtttttaagacaatgtgacatttctttctctgccctcatccttacaggatttttaggacccttatggaaccaagttcctagtgtcactccaaaataatgtaactggctggatgcagtggctcacgcctataatcccagcactttgggaggacaaagcaggaggattgcctgaggccaggagttcgagataagcctgggcaacatagcaagactccatctctacagaattttttttttaattagctggacatggtgttatgtgcctgtagagtcccagatactcaggatgctgaggcaggaggatcccttcaacccaggagttcaaggctgcagtgatctgtgatcacaccattgcagtccaacctgggtgacagagcaagatcctgtctctaaaaaaaagaaaaaaaagaaaaaaaaagaatgtaactggagatgcattcactttgcttttgcccagccattttgataatcaatattaggggtttgggaggtagggagtggggaatggaggaacagactagaatgaaagccagcgctatggtaaaaggaattattttagaatggtgggattacaggggagattccttctcttattttctattttactaattttatgaaacataattctgtttcattatgtgtatatacatatgtttaaattaaatgtatttaaatatgaatcttgaaagggattgattattccaaaggaaatgaagtaataacaatttcagggaaacttttttggatggaggagcatctgctcatcccctctccagtcctattctgtaaatggccttggaaggctgttcctacctctgacatgtcttagaaccacgttgaagggctaggggcataaacaaggagaaaaacagtgaaggagaaaggcagagaagattattagaaaagcttaagataatgatgtgttttatgtaattcaaacttttatcatagtgcttcccaatcatttgaggtttcctcagccattaactaggttttaaaattttcaaatctgggggttttgttttgagttttaaacccacaaggactctctgtcccctgtgttctttttcctcttctgaatccagctgtcatcgttagtatatatcagtttcctgctggaatggaaagaaaattatagtgtccagttgtagttgagggaacaagaaagaaaaagccgaactgccacaaggactcagagggctgggtctcaggctgggcagcgacatggagacgagagctttaattcttatattaaacccatcttaaattatttgctctcaggttggaaattttccattgaaatttctgtttacagaaatactatctaagacttgactaaatatttacccctttgacagatggactttctgtttctcttatgcccacaccccttaaaattgtgtctgtcacaactactgaattgaacattttcttttaccaagtatttaaacaaatacctacctgcactttcagactttcattttaagctctcttgttgggttttatgagcgggtttttcctttcctagtctccattttataaattttatgcaacttggttcttttataattatgtgtatgtgtaatatattgaaatatgactcatgaagaggattgattaatcctaaagaaatgacatagcaatcatagataggaatattttaggctgataaggatttgtccatccatacccttcatataaatgatctcagaaggctgttttcctacccctgaaatatggataggatgcccattataccctcatttttaggaaacattgttttcaatctcatcctccttgtttgtagggggctataataatagtggccaacatttattgagcatctatctctatgccaagcactgccaagcattttatgtgcattaatgaagaaagtactaatgttccttcatgagaccacagaaactgaggcatagcgagaagtgcctaacatcccatgtgtgctaaggtggcagatcctgagctctccagctgccctcactgtggcctcacggcacaaccagggccagagtcaggaaacatcagtcactcgcttagggaagggagtccgagaaccctcttcgtggactcaacttcccaggcttctgtccctgctgcagaatgcccaggccacagagaagggacccccttttcaggagcttccacgtcacaggcttttatggggcctttcttgcttgtgtttctgtttcccatcctgagggtgtgtggaataatacgagagcctacccaggactggagcgtgttattagaaagagcacgcttgactgctcccgggcagccacctgccctttttcccttggaaagtggacctatggccactgcacaaaacacttcctaataccaggctgctggtgactacattttgtggtttctttgttagttgatatttatagttcagatctcatcactctgccaagtgcaataaacattttgttttaactggaatataacttttattattgttattatttttcttttaaatgtcttaaaagtgaccagcttgtgcaagtggagtcagaaaccctaaatagtctaaatgccaagtcagtgcgctctgtagatcagtgtacgattagaagacaggctctcatttattactgcttgtatttatataatggaagttaggtaacataagcccctctgcaggccagcttagatgttgatgatgcttaaatggtaaaatctgtgagaaatgttcaacaatgccctgtatttgtactgcctaaaacatgaataatacatatgtgacatgaataaataggtcagtgatttttatgacatattaatttcctttacctaagttcctgggaaatatagctgaacagttacagagaatgaaaacaaacactggcatcttacaaacacctgctttgattatttagtctaattaggttaaatttaactatttccattttaacaaattgaaaacaattcttatctgttcctcggtcatgcactttatcagtgttggatgcagatgtgtttaatatgacacagttggtgctgttttctcagctctgggtgggaaataaaaaggaattgagaacatatttttagagtcttctggggactttgtatttctgggcctatagctatgaaattttaaggaggaggaaaaaaaaaaaaaaaaaacaggctttgttgtcaataaattagttggttttccccaaaacactggaactgtcatctgaactgctgcttgtgccaaaattatctttcccagggaacagtgagcttctaaaataacagatgtttcctagctgtctttcagaagtcagaataatatagggtatgttattagattgctaggttaacgtggtgtttactctgttaattccaaaccttgcgctgagtacagaggcccacaattctttagaaatttagtttagagatcatagcaatttaagtgacttacccaaggttacacagctggttagtgaaaagggtgagctttcctgactccttattcaccgtccatttctgtgaccaaagttaaaggcctcatataatgtgagagttgtgtctgtggcagaaccgtgtcatgaaaccttctacccacattttcatcccaggagtgaaataccgttctagtcaacaactagggtctcagaacatctgtgatttcttttttttttttttttgcagctttgtcacccaggctggagtgcagtggcacagtcatggctcgctgcagcctcaacctcatgggcccaagtgatcctcctgcctcagcctcctgagtagctgggaccacaggcgcatgccactatgccaacctagtggtttttctgtttttgtttttaattttttattttgtagagagaggtctccctttgttgcctaggctggtctcaaacttctgggcttaagcagccctcctgcctcggcctcccaaagtgctgggattacaggcatgagccaccatgaccggccacatctgtggtttcagtgttctctgttcctgcctttcccagctccagctgcacatcacagataatctgaaagtagttgcccatgtcagttaaatttttatgcaagtagtttttgaaagtctatttaagatatttcatgtaaatggaatcatacctttgtggcctttcatgtgtggattctttcacttaacatgttttgaaggttcatccatgttggtcattttgttctttttatggctgaataatattccagtatatagatatcacattttgtttatccattcatcagtttgatggacatttgggttgttttcacttttgggttgttatgaataatgctgctatgagcattcatgggcaagtttttgctgggacctgtgttttcaattctcttgggtatttacctagaagtggaatgtctgggccatatgccaactctaagtttaactttttgaagaattgctaaattgtttccaaagagtctgcaaccatcttacatttttaccaccagtgtatgaagtttccagtttctcaatatccttaccaactcttactgtccatctgttttattaatagccatcctagtgctgggatctaattgtgcttttgatttgcatttccctaatgactaatgagtttgagcatcttttctagtgctagttggtcatttatatatcttcaaagaacggtctcttcagatcctttgcgcatttttaagtgagttgtctcttttttttttttgagacggagtttcgctcttgttgcccaagctggagtgcaatggcacgatctcggttcactgcaacctccgcctcccggtttcaagcgattctcctgcctcagcctcccaagtagctgggattacaggcatgtgccaccacacctggctaattttgtatttttagtagagacaggagttcaccatgttaaccaggctggtgtcgaactcgctacctcaggtgatctgcctgcctcagcctcccaaagtgctgggattacaggcgtgagccaccgcgcccagccgagttatttctctttttattctcaagttgtaagggttctttttatgtccaagatattaatcccttataagacacacagtttgcaaatattttctccctttctgtggatttttactgtcttcataatatcctttgatggacaaaagtttttagttttgaagtccattgtatctgttttttattgcttgtgcatttgatttcatgtctaaaataattgcctaatccaaagtcacaaagatttgcacccatgttttcctctggaagttttacagttttagttcataagtttatgatccatgttgagttaatttttatatctgatatgaggtacagattcagcctcattcctttggcatatgtgactatccatttgtcctagcactgtatttcaaaaagactatcctttccccattgaattgtcatggcacccttgtcaaaaagtcagttgaccataaattaggggtttgtttctcgattcttaattgtattccattgatctatgtatctatccttatgccaggagcacactgtcttgattatcattacttcatagtaacttgaaatcaggatgtgtgagtcctctttcttcatttttcaacattgctttgcctattctgggttccttgcattttcacatgaattttaggatcagcttgtttggggggggggcgggaaagggagggagggagggagggaggaaagaaaaagccagctggaatcttgatagggattgcattaaatctgtagatcaatttgaagagtactgccatcataacaatatgatgtctttaaatccacaaacactggatgtctttccatttatttaggtctctttaatttatttcagtgggtgttttatagttttcagtgcacatatacttcatgcacatctttcattaaataatttgttcctattctttttgatgctgttataaatagaattattttcttaatttcatttgtggattgttcattgctactgtatagagctacaattgatatttgtatattgatcttttatcctgcaacattactgaacaaacttattagctctaataggttctattgtggactccttttttcttgactaattgctctggctagaacctccaatacagtgttgaatagaagtggcaagagcagacatcttgtctcattcctgatcctaggggatcttaaagcattcactcttttaccattaagtatgatgttagctgtgggttttttatagatgccttttgtcaggttggagaagtttttttccatttctagtttgttgagtgcttttaccacaaaagaatgttgaattttggcaaatgaccttgctgtgcctgttgagatgatattgtaattttatccttcattctgtcaatatggtgtgagttgtgacattttattgctgagtagtattccattgtgtgtatggcttgtttatactaatttactagttgatggtcattagggtcgtttccactttttggagatcgtgaataatgctgctctgaacattcacatagaagtgttcggtcatatgttttcatttctcttgggtaaaaacctaggaaaggggttactggatcatatgataaggattgtttaatgttacaagaaactaccaaaatgtttaccactttgcattcccaccttgcattcatgagaagcatggctgataatgttgagcatcttttcatgtgtcatgtttgactatgtatgtcttttttggtaaagtgcctattcacatcttttatacattgctttttaaattcgagttgtttgtcttactgggttgtaagagttttttctaaatacaagccctttatacaggtaaatgttttgcacagtttttacctggctgtggcttgccttttcattttcttaacattgtcttttgaagagcagacatttttaattttgataaggtcaaatttatccatttttttgtgtgttttagactttttatgccctagtgaagaaatccttgcctattccaaggtcacaaagatgctccctcaaaacttcttctaaagttttgtagttttgcatttaacatttagatctgtagtctatctcacgttaattttcatgtgtatcatgagatatggttggcattctttttttttttttttttttttttttttgttatgggtatccaatgtttcagcaccattttttgtttgtttctttcttcgtttctagagacagggtcttgcactgtctcccatgctggagtgcaatggcgagatcatggctcaatgcagcctgaaactcctgggcttaggaaatcctccaaccccagcctcccgagtaactgggactacaggcacatgccaccatgccctaattcttaaatttcttgtaaagacaaggtctcactatgttgcccagattggttttgaattccagggctcaagcactcctcctatcgtggcctcccaaagtgttgggattacagacgtgagccaccgtgcccagcccccaacaccattattgctttaaatatttcctccatctcttgccctttttcctttctttctgtgattccattcaaatgtaaattaagtcacttgaagttgtcccatatgtcgctgatgctcattctttttttttaatctgttttacttttgatagcttcaacttttgtgactctaaattcacaaactttttcttttgcagcgtataacgtactactgttctcttttaaaaagaatgatacagggtctcactgtgttgcccaggtggccttgaactcctaggcttaagcaatcctcctcccttggcctcccaaagtgctggaattacagatgtgagccactatgcccagcctctgctattattttcatcttgtgaattttttttaattttagatactgtattgttcatctctagaagtttcatttgtgtcctttttatatcttctatatctccctttatcatgttcagtcttcctctagattcttgaccatatgtagcaggtgtacgtaactgttttcatgttctactttctaatttcattattgctgtcattttaggatatttttaaattttttttctcctggttatgggttatattttcccacttctttgcgtgcttataattttttattagatgccagacaatgttaattttatgttgtcaggtattggattttgttttattctttaaagtgttggactttgttttagcacacagttgagttacttaggattggttggattcttccaagacttgcttttaagcttagttctggtgggttcaatccaaagaggagcctttagtttagggcaaatgtagctcctctaacaggatccttctgaggtcctacatgatgtcccatgtgttacaaggtctctactctgggtgagagaacacataactattgtgagcctacatgagttccaggaattgtccagctcactgctttcttgcagttctgcagttctttttctagcctttcagagtttcaccccttgcatgtgcaaatcagtattcagctgaaagattcacagggtcccttggtctacagatctccagagctctctcactatacagatttgttctctccggtattgtgccccacaaattccagctgcctgagtcttcccaaactctgatatctcatcgtttcaactgagccaagacctctgggctctgggttcctcctctctgtactggggcttagaagttgcctcttggcagtaagctcaggcaattgtaatgcttcccttattgtcttcttgttgagtcttgcattgctcatatccaatgattaaaaacaataatttcatacattttgttcagttttctaattgtttatggtggaaggacagttcctgcaatggttaatctttcatagacagaagcaaaaatcacttccatcaccttgtcttgaggcctcttggttcttcaactgtaaagtgggcataataccctcagaggattgggataaatgtcataaaaattgtgaatagtcacattacaagaaaaagccaacattgggagaacagcagctatcaagagataaaactgatagcaagaacaaagaaatgaatggccatcacatccagggtggaagcagctggatcctgactcccaggctcatttccattgattacctggcagaattaacctaactcctctctccatgttggggctggacttcacattaaaataggagcactcctagtacaaccagattttgttggattttgctagcagctgtatactgcaccttgcaacatcacagatgatttggtgccaggaacctcttcagtctcagactctacagaccctcaaccccaggggcattcccagaactaaattgtagcactagcaagggactgagatgggtgatcctagcctctcttactacaggtgaggcaacagaggtaagcccattatgtaaaggaatcttcccagttagcagttgactcccaagttggttttgcagtatcccatggactaagtgtggaagagaagccccaggtcctttgtgagttagagtttaaattaaacagggtcatggtggacaaatttctgattcccaatcctgttcttcggaccaattcgccgaaagaaccagaagtaggccgagcgcagtacctcacacctgtagtaccaacactttgggaggccaaggcaggtaaattgcttgagcccaggagttcaagactagcctgagcaacatggcaaaaccccatctctacagaaaatacaaaaaattagccaggcatgggggctcgtgcctgtagtcacagctccctgggactgaggctgagttgggagaatcacctcccagactcatttccattgcttcctgagcctgggaaggctgcagtgagctgcgatcataccactgcactccggcgtggtaacaagagtaagaccctgtctcaaaaaaagaaagacagagagagagagagagagaagggagggagggagggagggaaagaagggagggagggatggacaggaaaggaaaggaaaggggaaaggagaaagaaaaggggaaaggaaaccagaagtagtgtatgcttagaaataactatgtttgtgtctttgggttgtcatgtgtttatccacagtagttctggacttcctccctgtgttgggcaaaggctgagatgggatggtgggtggaggcaatagtaaaagctgtgggtcccacccagggcctggtgagctcatctttagcctacccagatcctttgagctcttctggctctgctgtctcccaggccagaggggctgtgttttgattttatgggctgccaggatagtctttagagtatcctcagaagcacatcctccttcctcagcagccgatcgggaatcctacacttgaaaaatacatgcctttgagagtatgctgggacaaggaaaagtaggaatgttttccaaggggtgtgtgtgatgggggccacacctgtgtaagcagagatgatggggttcagagaaccagaaacaaaccaaggcaagaaataaacaaccagtactagttcagggtgagacaaagttagtttccaaatccctccaccaggtcattcaacatgtttgtaactggaggggcccctggggtcaggattacagtttactgggagggtcaaggattaaatagaagagtggaatttccctttgataaggagaagccaagatttattaagtcagtttattctgttgttattgttgttgttgttcctatggtttccttttctctacaaatataatttttttaacagagaaattgcataacaggacattgacgttaagagtgtacaaattatcatctgtgattatttttagaaccagtttatccaccatttcagataaaaacttttgttggatctgattacagagctctgaccaatgctacaattctttaaaatagaaaaagcaggctgtctccctatgcattgaaagtgaagtctaggccgggcacagtggctcatgcctgtaatcccagcactttgggaggccgaggtgggtggatcacctgaggtcaggagttcaagaccagcctggccaacatggcaaaaccctgtctctactaaaaatacaaaaattagccaggcttgatggctggcgcctgtaatcccagctactcgggaggctgaggcagcagaaccacttgaacccgaaaggcggaggttgcggtgagccgagattgcaccactgcactccagcctgggcaacagagtgagactccatcacaaaaaaaaaaaaaaaatgaagtctgctctgtattttttcgtctcctacttttttaaggaggttggagatactgggagagaaaggggagaatagagaaaactttagaacagttatgtctgcaaaggagaaattcacttatttgttcattcattcctttgaggcagagggaagaacatgtgcaagtgcagacagaatgaggagccttctgagactcagatgaccttccacggtggcacgaccagtatcactgccatttgcacttataagtgacattttgtagtagtgaaaccatttttttgttgttgttgggttggtcttttcagtcctgaggaggatccttctgccttcatggatactgactgctgcttctaaatagaacaagttgtgtgtgattaccggggctttgcctcccccatagtcatctttgctgggaccgagaaaatgttgtcactctgggccttgcattttttctttcttgccctttttattttggcacaagacaatcaggctgtcttgatgagtgacgtaagagtgaaggccaggaactgtataatatgcaggagctctctgagcactagatgaaggggttgacttatgatgaagggccatggtgtacaaaaacaaataccattaaacactagaattacacacattcagcatggcaagatgtttacactgtggaaagcatggatgatgtcagatggtctgaggtggaggccttgaaagtgcggtccctgccccagcagcatcagcattacctgggaatttgttaggaaatgtaacttttggggagccctgctcagacttactgaaattagaaacttggggtgagcagctaaagtttgagaaccgccggtctgaggtaacagtacagcaaccctacatgggacattgaccactgattggaatgccaggggaaactgccctctctaattattattcctcccccacccccggccccacctaaagttaaattcacctaaattaaatgctgttatgatgtaacttcactgtatccataattatgtggtaatgatattaccatttttttttcagaatgcccttgttaaagctatttagattaacatgcatcttttaaaaattatattgattttttttttaatttaacaaacctatatgagtagctcagaagagcaaaggtgaatggcccacaggccttcccttttgggttatgcttctcctctagagaggagagagactgccctaaataatagaacaggacatgctaagtatgatgccatccctgctcaaggtctgtgctactgttaaatcctctttcagcagcctgtcaaaattagcactctcccttggttagttagggagtggcagttttgatatctaaagttaactttcacaatgactgttcatgttgcagacattacactggaatctccaacctaccaaagaaccaaacactgctaagataacacatctgatattaccaaaggaattgtgtgaatgggccaccatactcctttatgcaaaacactcctcagtgccatgaaggactctgcaaagttccttcagtttcttcctgagaatagaggttcctaatagttatgccatccaaacagactagcctcaagaagcttttatcaacttctccaaagctgtaattcactagtgctgctccctggtgatttcaccagcccatggcacaaggaagctatagcaaaatgatactatagcaaatttgtcttttttttttagttttttttagtttcttagtttttagtttttagagatagggtctcactatgttgcccaggctgaagtgcaatggctagtcacaggtgtgcttatagcacactgtagcttcaaactcctgggctcaagcaatcctcctgcctcagcctcccagctagctggaactacaggtgcacgccacgatacctggctacatctttttcttaaaaacaaatttctttaaattatcttttatgatgacactatgattttttcccttttggggcataagagactttctttcatgaagtgataatagatagtaggtttttaacatcctttgcaaaataaaaagctggcaacttacaccagtctgccacattgtgacatttcattaggaattacttctccaggaaaccaggacatagcacagtaggaggtattgtccttccatgtgaatccagccattcagccattcccttgaaggccagaaatttacttgctccaaagagtgaaaaaaaaaaaaaaagttaattccaaaaatgaaatcaaattggatgcaagaatcagtcacacatacttgagtggctgagttgactgcactggtgggaaagtacaaagactttccaaacaaggagggctgaaaaaagctccagccaggaagagttagaaaaaaatcactctaacttaggaaaagtacgatggggccattaaagcagggacttgattctttcactcaaacatttgggctttccaacaaagaagaaacccaaatctatcaaagttgaggttgcaagtagaaaaggtaaggtttcagatgggtgtggtggcatgcacctatagtcccaggtactcaggaggcagatgtgggaggatcacttgagcctaggagttcaagatcagcttgtgataaaccatctcttttcctttgtaaaaaaaaaaggcaaagaaggtttaaaaattacagtctgctaaagaagaaggctgctaaacttcagactggatcaaacttcagttatttgtgtcctgcaaacgaagggcactcatagaaatgaaaataagtaccacgtgttcatctagactctttatggcaggacacaaacgttgttgcaccagggaaaaatcccgattgtgaaaaccctttgacgaactctacctgcagtgggaaacagactgtaccactaaaacagtagccgtcaatccctgctgtacctaggtcactttaaaactagactgctaggtttcaccccagagatgtggtcaagtgtcccctgacatgagtatttttctaaagctctcagattaatgtaatgtgctttctgggctgagaaccactgtgcaagagaaaagcagcatttctttgttagctgctgcagtagcttatgctgaagtattggacattcctgcctccaaccttctgttccacctagagaccctctcactctgggtactgagatggaataggggaatatggttcctgtggtccccacccagttggagctccatgagagcaaagccaggtctaattcactgctgcatctagacctagaacagaacctgcacacaacgagccagtgtttacattgctgaaggtctggccaggtggctggcctgcctgccaggaacattcatagtgcgtattcgttcttttgaattcttggttattttctctcctttggtgtttttatttgaaagagaaattggggcatggtgaattttctagttcttcactactgtgaagtcctgcgctggaatcatacgtgctctgcgtgaaactccagtgccctacccacccataaaccctgccaacccgcgtgaaagttggccctgaggagtgtggttctcagctggggtgcagagcagaattacctgccagttcttaagattacagctgtctgcgcccaacttgaaaccaactgaatcagaatctacaagagtgggattcaggcatgtgtggttttaatatcattagtcattacctttacttgagggcagtggtttttaaaatacctggatcagcagcagcagcttcacctgtgagcttgttgaaaatgcaaatcatcagccccatcccaggacctgcagaatcagaaactctggggtgaggtcgaggcagcagtccgtggtttcacaagcccttcggggcatctccttgagtccgagttgctgcacaaacagaatattttttccaagcagcagtttggagaaagtgcctaaatgaatgtcacttgataatttcctcccttttggctctaggtctaacctctcttgctgctcctctgttgacacattaattcagcaaacttatttaaaggtctctctgtgtctgttctctcctaactctccctgacacgtttgccctttcctctcctctcccagcaaggttcctgtgcagcctcagggcccaccttaaattgtgttgcctcttgaaagccctttttccatttcttccagtagaatatcagtgccatcgcattcattttggtctttcatatggctttagtgtgtattctctttacctaccttttccttagtgaccttgagcaagtaacttcacctctctgtttcctcatctgtaaaatgggaataataataataatagagcctacctcattaaagagttaaatcttgtctaggtgctcagaataatatcaacaagtgtcaattctaaaagtaatttttgttctggcacggtggctcacgcctgtaatcccaacactttgggaggctgaggcaggagaattgcttgaacccgggaggcggaggttgcagtgagccgagatggtgccactgcactcagcctgggtgacagagactctgtctcaaaaaaataaataaaagtaatttttattcgtagcattaaatcatgggtatgtaatattttgtaattacagaatagtacatgacatgtaaatactcaacaaatgtcagctttttttttttttttttgccttgagacagagttttgctcttcttgtacaggctgtagtgcagtggcacaatctcggctcactgctacctccgcgtcacaggttcaagcagttctcctgcttcagcctccggagtagctgggattacaggcatgcaccaccacacctggctaatttttgtatttttagtagaggcggggtttcgccatgttggtcaggctggtctcaagctcctgaccttgggtgatctgcccaccttggcctcccaaagtgctgggattacaggcatgagccactgtgcccagcccaaatttcagcttttattagtaacaattttaggacactaaacattttgtgatttttataggtttttgttggtgttgttgtttttgagacagagtctcttctgttgctcaggctggagtgcagcagccctatcttggctcactgcaaactccgcctcttgggttcaagcgattctcctccctcagcctcctgagtagctgggattacaggtgcccaccatcacgcccagctaatttttgtattttttttagtagagacggggtttcaccatgttggccaggttggtctcaaactcctgacctcaggtgatctgcccgcctcggcctcccaaagtgctgggattacaggcgtgagccactgcgcccggctagatttttatagttattattgtgtacttgttctttgtcctcccattggtcttaaagctctttgaagcagatctttttctttctcagctctgcatctctgtatctcccaaagtacctaatgcagttaagcttcctttatccaaaatgcttgggaccaaacatgtttcagatttcaggtttgggttttttttttttaaatatttgcatatataatgagacatcttggggatggaacccaagtctaaacacagaattcatttatgtttcatacataccttatacacataaccggaaggtgatcttatttttcccttggggacactgaataaactgcatctgtgtgttgactgcattaggtcaggtgtggaattttccacttatggcaccatttcaacacgtaaaaagtttccgatcttagagcattttggatttcagattttcagattagagatgctcaacctgtatatgcttaggaaatacttaaagagttaatactcaagtcacaggcagtgtaggtcaagaagtcccaaaggaatgtctaccttcattacactcatcagcatgcttgctccccatctcctccttctttggggtagtgccttcattccctggcttcctggtgatatcatcccttcttaaggccccagaccagaaaaatgggtctgggtgtccaactctcaagtccagcagactatacttacactcagcctggactatatccagaacagcccagatagttcttcctgttgttaattacaattttttttttttaattttttttttattgataattcttgggtgtttctcacagagggggatttggcagggtcatgggacaacagtggagggaaggtcagcagataaacaagtgaacaaaggtctctggttttcctaggcagaggaccctgcggccttccgcagtgtttgtgtccctgattacttgagattagggagtggtgatgactcttaacgagcatgctgccttcaagcatctgtttaacaaagcacatcttgcaccgcccttaatccatttaaccctgagtggacacagcacatgtttcagagagcacagggttgggggtaaggtcacagatcaacaggatcccaaggcagaggaatttttcttagtgcagaacaaaatgaaaagtctcccatgtctacttctttctacacagacacggcaaccatccgatttctcaatcttttccccacctttcccgcctttctattccacaaagccgccattgtcatcctggcccgttctcaatgagctgttgggcacacctcccagacggggtggtggccgggcagaggggctcctcacttcccagtaggggcggccgggcagaggcgcccctcacctcccggacggggcggctggccgggcggggggnnnnnnnnnnnnnnnnnnnnnnnnnnnnnnnnnnnnnnnnnnnnnnnnnnnnnnnnnnnnnnnnnnnnnnnnnnnnnnnnnnnnnnnnnnnnnnnnnnnnnnnnnnnnnnnnnnnnnnnnnnnnnnnnnnnnnnnnnnnnnnnnnnnnnnnnnnnnnnnnnnnnnnnnnnnnnnnnnnnnnnnnnnnnnnnnnnnnnnnnnnnnnnnnnnnnnnnnnnnnnnnnnnnnnnnnnnnnnnnnnnnnnnnnnnnnnnnnnnnnnnnnnnnnnnnnnnnnnnnnnnnnnnnnnnnnnnnnnnnnnnnnnnnnnnnnnnnnnnnnnnnnnnnnnnnnnnnnnnnnnnnnnnnnnnnnnnnnnnnnnnnnnnnnnnnnnnnnnnnnnnnnnnnnnnnnnnnnnnnnnnnnnnnnnnnnnnnnnnnnnnnnnnnnnnnnnnnnnnnnnnnnnnnnnnnnnnnnnnnnnnnnnnnnnnnnnnnnnnnnnnnnnnnnnnnnnnnnnnnnnnnnnnnnnnnnnnnnnnnnnnnnnnnnnnnnnnnnnnnnnnnnnnnnnnnnnnnnnnnnnnnnnnnnnnnnnnnnnnnnnnnnnnnnnnnnnnnnnnnnnnnnnnnnnnnnnnnnnnnnnnnnnnnnnnnnnnnnnnnnngctggccaggcggggggctgacccccccacctccctcccggtaggcacggctggccgggcgggggggctgaccgcccacctccctcccggttggggcggctggccgggcggggggctgaccccccccccacctccctcccggacggggtggctgccgggcggagacgctcctcacttcccagatggggtggctgccgggcggagaggctcctcacttctcagacggggcagctgccaggcggaggggctcctcacttctcagacggggtggttgccaggcagagggtctcctcacttctcagacggggtggccgggcagagacgctcctcacctcccagacggggtctcggccgggcagaggcgctcctcacatcccagatggggcggcggggcagaggcgctccccacatctcagacgatgggcggccgggcagagacgctcctcacttcctagatgtgatggcggctgggaagaggcgctcctcacttcctagatgggatggcggccgggcggagacgctcctcactttccagactgggcagccaggcagaggggctcctcacatcccagacgatgggcggccaggcagagacactcctcacttcccagacggggtggcggccgggcagaggctgcaatctcggcactttgggaggccaaggcaggcggctgctccttgccctcgggccccgcggggcccgtccgctcctccagccgctgcctcccgggcggccgttaattacaattttaagagcagatttctgagccatatttctgactgtgccaaataaatgaaattccttttgaatgtaatgctgtcctctagcagcagtgggtaggaaggatagggaaatggtacctggagatgatagtactgtgctcttattattattagattgttatgagattcggtttttagacattgaaacagagatgacacagaggttgaagatcccagctgcccagggtttcccccactgctttataaagatactgcctggctgggctcagtggctcccacctgtaatcccagcactttgggaggccgaggcgggcagatcacctgaggtcaggagtttgagaccagcctgggcaacatggtgaaaccctgtctctactaaaaatacaaaaattagctgggtgtggtggcgtgtgcctgtatttccagctactctggaggctgagacaggagaattacttgtaccggggaggcgaaggttgcagtgagccaatattgtgccactgcactccagcctgggtgaccgagggagattctgtctccaaaaaaataaaaaaataaaaagatgcctcctggtgagctgggaattctgcagtgtctgagttaagagtagcggtatggccgggcacggtggctcacgctgtaatcccagcactttgggaggctgaggcgagcagatcacgaggtcaggagttcgaaaccagcctgtccagcatggcaaaaccctgtctctactaaatatacaaaaattagccaggcgtggtggcatgctcctgtaatcccagctactcaggaggctgaggcaggagaatcacttgaaccctggaggtggaggttgcagtgagccgagatcgcaccactgcactcctgcctgggcgacagagcgagactccatctcaaaaaaaaaaaaaaaaaaacagtagaggtttgtctgcagccccagatggtggcctccctggggtcccatcatgttggagcccaagtccagtccccattttgccccctgtgacagactttgaaacaatttgatgtgttacataaatactctatatttttaaatctcgaattattgcaagtctatgcaaattttcaatttcaaataaatttttctgttacctgaatgttttacatatgcattatgtttatgttagttttctagaagtcagcagagttctctgagttataatgagatgataaatataaacggtgttttattagctataaatgcgtatcacttaaatgctgtctggtaagccaatccaggataaacttgttaacatcttgggtacagttgtcaggatttatcagagaatgctatgaatataatatctaaattttggcaaggcatttggtgaagtctgtcataagttcttgtagataaaacttcatggacagaatgatacaattaagaggattcataagtgggggatgactcaaaccgaagagggctagttaatgaattagtgagagcctggaagagcgtttgaggcaagggccagcagggagcctgctcaccaaaggcctccaccctccagcttgcccacatttttagtaattatttgattttgggcatttaggcattcctgtgaaattgaagtttgccaactactttgtatgcgtttttgagatagggtctcactttgtcgcccaggctggaatgcagtgtcagcatcctggctcactgcatcctcaacctcctgggctcaagtgatcccccacccagctgactttttattttttgtagaaatagattttcacagtgttgtccaggctggtctcaaactcctgggctcaagcagtcctcccaccttgggctcccaaaatgttgggattacaggcatgagccaccacgcccagctggtttacccaatttctattagatgatgaacatgtgtgaagaactgggtgctgggaggtacccgagactcctaccctagtccgcaccctcattccctagtcctgccagttttatcccttcagtgtttttttttctttcttttttgcctttttaaatgatcaccttggcttcagaccttcagcgtttcttaaacccaccttctcctgattccttctgaacttaaggccctcgtcatttatttctctcctggactacggtgcagtagtgttgtaactggtctccctgcctctaatattgcctcctcaacgataagagcacttcagtgaaaatgggcccctgaccttactgcttaaaataaccccccagtggcattccgttgcatacagaactagctgcttcacattgtctaggaggctttctgtactctagccacatttcttccctagcctcatctcctgccctttcccacctcaaattttatgctccagtgttatgggatggcctgtagttccccacatggtccgttctgtttcatgcctttgttgagcctttgctcagctggttcccctgcctttggtggtgctaacacattgtcacctgtcttcctctttgaggcctaggttatcatttgtaccactatattggaattatgtgttcatgcatttctctttctcaaactagactgactataaactccttaagggcagtgatcttatttagctcctagcacatagtaagcaggcaataagtttttggtttttttatttttttaatcagaactgagaatatgaaaagatctcggcaaatgaaaggtagaccataaaacttaacaggaggataaaatttaacagggatatacttgggcttaaaataaacaaagaaaacacatcttggcttaagtactgagtacaaagtgggagaaagatgactcaccaccatcagtagaccacgtcaaaaaagaagggctgtggtttcagttgactttgtgctccatatgagtcaacagtgtgatgcaactccagttcagaacagagaaagtaatagtcctgcgggtcaaaccatgcaggagatttgtgatccagcctattggccatcctttaagagagggtgaggcatgtccacaggaaagcagctagaataatgagagacagtgaccccatcatttgaggaaggaagtaggaatgtttcatctggagaagacagaggggacacaagaattgtaatcaaatgtctaaagagctgtcattgggagcctcaaaatgtagcattaggccagtgagtagaaacacaaaaagaactttttgacaattagatctactaacaatggaataagctgtctcatgagctccagggtactgtagggttcaaccaagagcttctgggaaagggtgttacagaggggagcttcacccctgaaggaagtttatactagatgtcctcttctcatggtcagctttgaggctcggtgataagaggtcactgagttcgtatttattgaatgttgaggaggggtgccaggaacgcattttctaatagtaatgcctttgtgcccctgttggaaaaattatacattacctaaatggaaattgttgtggactagaagtctgaaccttagagggccactcacttatgacagtgtttgaaatctgcttatgggagacatctgatggcctcacgcagtggattcagtcttcattctttcatgtccttttgtggaaatttaaagtgattatctctttcccttttgctttttttgcttcttagttctggagagtcttggcttctgggaggaagtcagagggattatctcaggatcagagctgataacgggattcccttgggccttcaaggtgccaggcctgccccagtacctccagagcctcaccagactagccattgctgcagtgtgggccgcggcagccaagagtggagagcgggagacgaatgtccccatctctttctctcagctgttagaatctgccttccctgaagtgcgctcactaacactggaagccctcttggaaaagttcttagcagcagcctctggacttggagagaagggcgtgccacccttgctgtgcaacatgggagagaagttcttattgttggccatgaaggaaaatcacccagaatgcttctgcaaggtaaagtctccaacgtactgactggccctttacactccccacattcttttgtgagccactggaatggtaggatcatgaaggcaagattgggtttaggctctccaggggcaataggaagtagattcggcagccagtggataaggactctctttttatggtggttggcatggcgtcatacctggtagggcaccaagaaaagcttttgatgataggagtattgatggcagagattaaccaaagacagagcaaaccactttgggatgtttaggaaacagatcattaaaaattcactgtagagtgtgtcagaggtagtctttgctgacatggctatttcagggcagttggccacctgggaagcataatcaaaaggaaagggcactggcctaaaatcagggcatctggctcccatcccaagtcactagaggccctctggttagtcattgcatcactctgcctcagtctcccaaaggtattatgggggaaataagaagtcagtgggagccttttgaaaggtagacctcttgttgatacaattgattatcatgtaacatctagagacatctccctgagtatttatttctcttttttgtgtgcggatttggcttacacagatactgaaaattctccactgcatggaccctggtgagtggcttccccagacggagcactgtgtccatctgaccccaaaggagttcttgatctggacgatggatattgcttccaatgaaaggtttgcccccaaaacctcctgtgcaaccttggtaagatgtatggtcccatcagtcattatgtaatgaacttgcacacaatcctgccctcaggtctcaggtcctgtatttcattctaaacctcagcctaagagttctaaactcaagcaatagaatgatgtcagtgatttgcattaataaccaaaaggtaattgcttccggaggcatttttgtaaccaggaggtagagattttcagtattcacctctgcatggattacagactatctgcaaaaaccggtgtatgaaatatgtctgattgtaattttgtgttgtttttttgtttgtttatttttctagatctgaaattcagagtgtagctctgagacttgcttccaaagtcatttcccaccacatgcagacatgtgtggaggtaaggctggttctgatcttgttccgggacctaggattttttgttctcatttactcagaagatgtcagtaaaagtgaacagtcttagcaggcagaacccctgtgatatgtgtatgtaacatctacagaaatattgttcgtgctggtttttcaattcgagtataacttcaaaagacttctttggacaccacctttcttttctcttgttttaggattttttttttttttttttttttttttttgagatggagttttgctcttgttgcccaggctggagtgcagtggcacgatctcggctcactgctacctttgcctcccaggttcaagcgattcttctccagcctcagcctcctgagtagctgggattacaggcttgtgccagcacgcccggctaattttttgtatttttagtagaggcggggtttcaccatgttgtccaggctggtctcgaactcctgacctcaggtgatccacccgcctcggcctcccaaagtgctgagattacagatgtgggccactgcgcccagcctgttttaggcatttttttaattagagttcaaagggataacagaaccttccccccaaaacacatatgcccaaaccccttgttttttccccatttctctagctggactctttatttaaagaggagtaagcatgtcaattccaaaagtatttaggattgcaacctagtgaactaagtatgcaaatacatcgctaaggcttaaatattcccccagaacatggcccagctggctctggatggaggcccagatgcgccccacctgttttacatgtcctttggtagtgaaatagaaccgaagtaagaaaaacagcttcctgggaagatgtcttaagacaaatacatgctacttaggtgcatacaagatagcaccctcacagaatcacaagtagaaggcagccaataccacaggaaaattacctgaagatccagattccacacagccacactgatggtggtggcataacattgtggaccctgagcccttacaataaacctagcactgctgtgtaggtactgaagatacagagatgaacagagactagagctatagtctaatgagagaaagttagataattacattaaatgctctagtaacaaggtgtgccagggccgtgggaacccagaggagggagtgagagttcagaggctgaagaagacttcatagaggagatcatgaagttcagagagcatgaggctgggcagagataaaaccaagggtaagaattaacaagcaggtccaatttccttagatctgtcactcaaaggcaagccagggagccaaacgtaggaggtcactaggagctaaaaaagcccccagaaaagtcaggtggggtggagggagtataggaatggagatgatttgctaaaaactatagcccaggaaggggaaaaaaaaaaacggccagacatggtggttcacacctgtaatcccagcactttaggaggtcaaggcaggcagatcacctaaggtcgggaatttgagactagcctgaccaacagtgaaactccatctctaccaagaaatacaaaaattagacgggtgtggtggtgggcgcctgtaatcccagctactcgggaggctgaggcagaattgcttgaacccaggaggcagagattgcagtgatctgagatcatgccactgcactccagcctgagcaacagagcaagaccctgtctcaaaaaaaaaaaaaaaacaaaaacaaaaaaaaaacaccagggccgggcacggtagctcacacctgtaatcctagcactttgggaggctgaggcgggcggatcaccttgaggtcaggagtttgagaccaacctggccaacatggcaaaaccccagctctactaaaaattataaaaattagccagatgtggtggtatgcgcccgtaatcccagctgctcaggaagctgaggcaggaggatcgcttgaacccaggaggtggaggctgcagtgagccgagattgtctcactgtactccagcctgggcaacagagcaagactccatctcaaaaaaagcaaacaaacaaacaaacaaaaaaacaccaagttctaagaagtcaccaggcagcctaacaagcctgccaaggcattattcttatctaaagctgtttttaaccagttgttatgtccactacatgaataaagtgatatttaatgaaaattgggagttttccagggagaaaaaaattaacagaactggagagaaataaataaaagacgctcctggggaaacatgagtttcttggtgcgttgggaattagcatcttcctcaaggtctaaaatactcatcatgttagttgcgtagatgcccatagatgatcaaaggaatcattagttacattttgaacatttaaagaggttcagttgatagaagtaaagtacatctggaacaacagtccctgttctagaaaaagtgaaagaacggagtttaaatgatgaaaacaatccagatgtttatcaactgatgaatgagtaagcaaaatgtaatgtatccatacaatggaatattatttggccacaaaattgagtgaagtacagatacatcctacggcatgggtgaaccttgaaaacattatgctaagtaaaagaacctagtcataaaagactacatattatctgattccatttataggaaatttccacttaaaggaaatgtccagaattggcaaactgatagagacagaaagtagattagtgcttagtcagggctggggagatgggaggatagggaagtgatagataaagggtgcagagtttctctttgtgatgatgaaaatgttctgaaattgaccgtggtggtgattgcacatatctgtgaatataccagagttcactgcattggccactttaaatgagtgaattctatggtatgtaaactgtatctcagtaaaactgttactattaaaaacaaggagctgaaggttgagttgatcaccgatgtccaatgatttaaatcaatcatgctgttgcaatgaagcttccttaaaaaccctgaagaatgaaaagttcagagagcttctgggtggtgaacaagatgtactcatgtgccaggagagtggcacaccccaaagctccatagggagaggaagtcctgtgcttgggatccttctggacctctccctgtgtatctgtcttttcatctgtctcttcatctagattctcatctttgtaataaactgagaatctagttttctaaaaaataaaaacaacactgctttgtttaaacaatagtgttagatgctgctttatttatttatttagagatggagtctcattctgtctcccaggctggagtgcagtggcatgatcttggctcactgcagcctccgccccctggcttcaagcagttcccatgcctcagcctcctgagtagctgggattacaggcacgcgccaccatgtccagctaatttttgtgtattagtagagacagggtttcaccatgttggcctggctggtcctgaacgcctgacctcaggtgatccacctgccttggcctcccaaagtgctgggattatagccgtgagccactgtgcccggcctgtgattctgttttaaatgttgtaatagaaacataaatactgtggcttaaatcagatagaaacagtccaaagccaatgtatcttgacagtgttgagtcaccaggttctcatactttgttgttctgctgtcctaaacacatagtttctatcttagggtcccacctgtttgctccagcttccaccatcttgtccttgtttagccagcaggaaggggaaacccaagaaataaagatcatgggcatttcctaaggcatgacttgaaagtgcacagatactacttctagtgtcatcccagtcttcagaacttaatcacctgttactcccaaaagcaagagagactgggacatgtagtctctagctgggtgcccatgggcccagccaagaatctggggttcttttactataggaggggcatctggttattggtgacaataagttgttatttgctggacagtctttccccacaagtttggtctttaccagaccaaatgtatgccagtgttctcataacctgatttgcatccaaaaagactaaaggaaggccgggagcagtggctcatgtctgtaatgccagcactttgggaggccgaggcaagttgatcacttgaggccaggagtttgagaccagcctgaccaacatggcgaaaccctgtctaattttgctaaatacaaaaattagccaggtgtggtggcacacacctgtactttcagctactcggaaggctgaagcaagagaatcactttaacccaggaggcagaggttgcagtgagccaagatcgcaccattgcactccagcctgggcaacagagcaagaccttgcctcaaaccaaaaaaaaagactaaaggaacttgttgtctagtcatagtgactccatcttaccgaaagacaagtcagattttcttccttgggcatatttctctctagttggaatcgaaaagcaactaaaaaacaactttcttcccattgagctaagagctaatctacaggcccagtttggtgtaggtcacccctaattctgtgtcagcccttgttgcatcttctgaactactgataggtacattttgtgcttttagaacagggaattgatagctgctgagctgaagcagtgggttcagctggtcatcttgtcatgtgaagaccatcttcctacagagtctaggctggccgtcgttgaagtcctcaccagtactacaccacttttcctcaccaacccccatcctattcttggtaagtgcgccgagacggaagtctgttgtaccaaactcacttaaaatatgaatagatattcttgcctaaaaaaagggaaggtgaaagatggcaacatgacacctgcctttatgtctttcagttatattcctaccgtcttagttcatgctctaatcattttcacgaacacactctttttttttgagacggagtttcactcttgtcacccaggctggagtgcagtggtacgatctcggcttagtgcaacctccacctcctggtttcaagcaatcctcctgcctcagtctcctgagtagccatcaccaaacccagctaatttttgtatttttagtagagatgagttttcaccatattggccaggctggtctcgaactcttgacctcaggtgatccacccacctcagcctcccaaagtactgggattacaggtgtgagccaccactcccagaccaccaacacactcttaaccagcctcttgtttttcagccttacccctaaacttttttctacaaagagcctctttatgaaatgcaagtctgataatttcagtccactatttaaaacctttgagtgggttcccactgctttcagtataaagcctaaacaccctttagcacggctcataaggcccttccttttctgtcccctagcccactcctcctgccttatcatccaccactccctaacacgggccctatgtgtcatcagtagggaacagttctctaaattaaacaaaccactgcttgactgacttctatttgtctttcaaaacagcctaactgtcccctcttctgggaggcctattgcaataatctaggtgagaaatgaatggatgagtgtgaagctgtggcagcaaggaagagagaacaggctcaaaagatttaggaagtagaatcaacaggacttggtggtattgaggttgatatagaggaaaattcaagaatgacttctaggcttctggctaaagtgactggataggctgctggttgcattcagtgatttttaagttgaaggtatctgtattagtctgttctcacactgctataaagaactacctgagccaggcacagtggctcacgtctgtaatcccagcacattaggaggctgaggcgggtggatcacctaaggtcgggagttcgagaccagcctgaccaacatggagaaaccctgtctctactaaaaatacaaaaattagccaggcttggtggcacatgcctgtaatcccagctattcaggagaattgcttgaacccgggaggcagaggttacggtgagccgagatcacgccattgcactccagtctgggcaaggagcaaaactccatctcaaaaaaaaaaaaaaactacctgagactgggtaatttatgaagaaaagaggtttaattgactcacagttccatagtcttaacaggaagcatggctgggaggcctcaggaaacttaacaattatggcagaaggtaaaggggaagcaaacaccttcttcacatggtggcaggagagagagagagcaggaagaagtgccacacactttaaaaccatcagatctcataagaactcactcactgtcatgagaatagcaagggggaaatctgcctacatgatccaatcacctcccaccaggccccgcctccaattcaacatgagatttgggtggggacacaagtccagatcatatcattttgccccaggcccctcctgaatctcatgtccttctcacattgcaaaatacaattatcccttctcaacagtcctccaggttcagctcatttcagcatcagctcaaaagtccacagtccaaagtcttatctgagccagggtaactcccttccacccatgagcctgtaaaatcaaaaacaagttagctacttccaagatacaatgggggtacaggtggtgggtaaatgctcccattccaaatgggagagattggccaaagcaaagggtctacgggccccatgcaagttcaaaacccagcagggcagtcattaaatcttaaagctttaaaataaattcctttgactccatgtctcacatccagggcatgctgatgcagggagtgggctcccaaaggccttgtgcagctctgcccctgtggctttacagggtacagcccttgcagctgctttcacagggtggtgttgagtgcctgcggcttttccaggcacacagtgcaagctgtcggtggacctaccattctggggtctggaggacggtggtcctcttctcgcagctccactaggtagtgccccagtgggaactctgtgtgagggctctaaccccacatttccccgtctatattgccctaatagaggttctccatgagggccccactcctgcagcagacttctgcctggacatctgggtgttttcatcatccctctgaactttaggcagaggttcccaaacctcaactcttgccttttgcacacccacaggcccaacaccacatgaaagccaccaaggcttggggcttgcaccctctgaagcaatggcccgagctgtaccttggccccttttagtcacagctggagctagagcagctgggacacagcgtgctgtgtcctgaggctgcacagagcagctgggccctgggcctggcctaagaaaccattttttcttcctaggcctcctggcctttggtgggaggggctgctgtgaaggtctctgaaatgccctggagacattttccccatcatcttggctgttaacattcggtttctctttttttttgagatggagtttcactcttgttttccaggctgcagtgcaatggcacgatcttggctcactgcaacctctacttcctgggtttgagcgattctcctgcctcagcctcctcagtagctgggattacaggtgcccaccaccatgcctggctaatttttgtacttttagtagagacagggtttcaccatgttggccaggctggtcttgaattcctgacctcaggcaatccacccatctcagcctcccaaagtgctgggattataggcatgagccactgcacctagccttggctcctctttacttatgcaaattctgcagcaggcttgaatttcttcccagaaaatgggtttttcttttgtaccacatggccaggctccatgctctgcttcactttcttttaaatgtaagttccagtttcagataatctctttgttcatgcatatgagtgtatacttttagaaacagccaggtcacatcttgaatgctttgctgcttacaaattttttctgccggataccctcagtcatctctctcaagttcaaagttccacagatctctagggcaggggcaaaatgccaccaatctctttgctaaagcagagcaagagtgaccttacttcagttcccaataagttcctcatctgcatctgagagcacctcagtctggacttcattgcccatatcactgtcagcattttgatcaaaaccattcaacaagtctataggaagttccaaactttcccacatcttcctgtctttttctgagccctccaaactgtttcaacctctgcccattacccggttccaaagttgcttccacattttcaggtggaaatgtctttatagcagtgctccacttccagtaccaattttctgtattggtccattctcacactcctatatagaactatctgagactgggtaattcatcaagaaaagaggtttaattggctcacagttccatgggcttaacaggaagcatggctgggaggccttaggaaacttacaatcatggcagaaggcaaaggggaagcaaggcacagcttcccatggcagagcaggagagtcagagagcagggagaagtgccacacacttttaaaccatcagatcttgtgagaattcactcactatcatgagaacagcaaggaggaaatctgccttcaggattcactcacctcccaccatccactccaattcaacatgagatttgtgaatccaaaccatattagtatctttgggacgtaaaggtggagatattttgaaattaaatggatgtacagatcttatctggtttccagcatgttgtacacgtccatgtctctcctcactgctactccgtgtgtcaagagtaataggaaagggcagcatgtcaatgatgtataagaaaaccaagcttgagaatatcctaaggaattgaaaagcatagttctttttttaaaattttttaaattgtgtcattttgttttttgttttgcttttaagcatagggtttaataaaaggaaaccccaggttctacagctgtgcttcaaccccaaccctgccctctcctgccatgtttaatcccgtattaacatgctatgattctcttctcacctattagtagaattatatttttgtgtacctcttccatgcccagccctcaagaatcagacatggtcactgcctccaaggagctttcagtatagttgtggagaaaggatttacagaataaaggaaggaattgttttttagatagtgagatccaaattttaaatgttgtaggagttcagaccaataaagggtctcctgtccctgtatctctctgggagacaacgttttcttcaatatggttttaacttttttcttcttagtgacttcaggcatttttcttacagccagagagacattgagaagggaccttctgtgagtgtgatttaatcatgagacccgaaggaataagagcaaagggtgacaaaccttagtcaagcttctccagtaaagttaataccattttgcagcacattttctgggtgactttaactactcaaaccctagcttataacaggtaaaatgtgtgtggaataacctggaattcttttgtgaaatttggtcctgtgcctacaagaacatgagaaataggtgcagtgactcatgcctataatcctagcactttgggaggacgaggcaggaagatcacttgaccccaggagttcgagaccagcttgggcaacacagcaagatcttttgtctacaaataataaaaaaattagccagatgtggtggtgtacacctgtagttccagctactcaggaggctaaggcaggagaattccttgaacctgggaggtcgagcctgcagtgtgagccattgtgccactgcactccagcctgagcaacatagtgagaccccatctcaatgaaaaaggtactgaataggtagaagcaaaggacataaaagtgcatgagaggccaggcgtggtggctcatgcctgtaatcccagcactttgggaggctgaggagggtgggtctacctgaggtcaggagtttgagcctgaccaacatggtgaaaacctgtccctactaaaaatacaaaattagccgggtgtggtggtgcatacctataatcccagctacccgggaggctcaggcaggagaatcacttgaacctgggaggtggaggttgcggtgagccaagattgccccattgcactccagcctgggcaacaagagtgaaacttcatctcaaaaaaaaaaaaaaaaaagaagtacatgagaaaagtcaagggcacagcaaagtcatttaaggaaaaagaaaaattgaaatggactaaagagggaaggatctgaaggatataaatgatgaccatattaaagaggaaaatattaagaaaggaaggtattgaacccttacagaacaactagaaagaatggagactgaaaggctgagtaaaatttaaatcagatctgtaatgaaaagaagagaacgaaaccccaaatggagccactgttattattggtatgactaaagcatcagtgactctgaaaccaggttctccatgtacagatgaggtagaggatagacaaaggggagttcttagggaagggtagtttctccattgaaaggatggggatgctgtgtggtggtcttccatggccctccagtgataaccctccacaagcccaggcccaccccacctggactagaggtacccctttctgggaggccatgctcacctctcactttcgtcatgaattctgtgtcagttacagcagtccactctcatctttcctgttgggaatcacagccacacaattttgttcttcacaactcattgctttgtgtttttgactttatattccttttgattgctcaggacaagatactatcttttattattcattgtccgcagcagcacctagcacaggctgactagacagatcagtgtccaggagtaatggcagtcagatagtggaccccctacatacatgggacacaagctgctgcctttatcatgggtctcttttttttgttgttgttgttgttttgttttttgtttttttggtcgggagcgaggatggagtctcactctgtcgccaggctagagtgcagtggcacgatctcagttcactgcaacctctgcctctcaggttcaagcgattctcccatctcagcctcccaagtagctgggaatacaggcgcccgtcaccacgcccagctaatttttgtatttttagtagagacggggtttcaccatatgggtcaggatggtctcaatctcctgacctcgtgatccactctcctcgtcctcccaaagtgctgggattacaggcatgagccaccacacctagcctctctttttttattcttgcccccagagcataatcttgattgatgcttcactttcagaatttataggctcagacacttgaatcaacactgggctagtttctccaaagcagtcttatgcataaagttttcttctagagaatcaggactcaactaggagagcagggcagagggtctttgtcacctgggcagcatcttctggaggccttgcctagcgctggttgcctccggaaagcctacatcctcacccccaaaaaaggcatttccaaatctgctcccttaggagtctgtctttgccaatgtttgtctaacactctttctatcttaacaatacccagaaaaaaagagatagctgtaactcattcaatgctcctctcttccaccagggatttgaagcagtatttgcacctgcctgttaattgcattctaggtaattcagattccttttggtcttcttagagttgcaggatacacttgctctctggaagtgtgtccttacccttctgcagagtgaggagcaagctgttagagatgcagccacggaaaccgtgacaactgccatgtcacaagaaaatacctgccagtcaacaggtacctcgttcttatccttttgcattgtcttatcgctgcaggatagaggttggaacacttttctataatgagccagatagtatcttaggcattgttggtcatttggtctgtgtctcaactctgccatcttagtgggaaagccacaaacagtaggtaaacaaatgggcatgactgtgttccaataaaactttgcttacaaaaataggcagcttctcagatttgatctactagccgtagtttgctgacccctgctgtaggacatcctaaagaaaaattatttttaaaggtagaaatttaataaactgttaggtcttttgctggttacgttgtcatcggttttaaataatgccaagtctctattatctgtgtggttccataactcaggaatcacaaaaccatcattttgttcctgagtttttatatgtgacagaaagcgagaaatgattatgtgtacgttaagtttctctactttgtgtcctagctgctcatttgataataacatgaacccaggagggaggaggggagtggaaagaagagcaccctagctgggtagtcctgaggtcgcagccgtcgtataagcggttacagccccaggcccggggtcatgtgcatgtaatggcaaatgctacgaaagctaaaaggaactcaggctgtgggtagaaaatgggctgctggatgaaagagatgggggcagatggagtagaaataaggtcacacctctggacaagtggccatctgggagggtgcctgctttagcagactcggattctctgtgcttggggctgggtgccaggaaaggtctctggatcagcggtcccaatgagaagcaagaacactgttttgaggcaagggatcaaagctgagcaaagaagttcaccttaatagacagcagaatgagagaaaaggaggccagataagcctttgtaattgatgcaaggcccctcatcagttactgtggctggggctgcttgccaaggcaggacacaggattgtgttccctggaagcctccccagatgtgtgaaccttccaggatctgaatcctcagtcaaaatggtctgtgtacacttctctgcctatgtggaagaagctagttttggaataatctctcagtgataccgcaccagggcaggtttcgcctagatcagcttttcctctcagcaggatagcatttggaacagagctgcaagtgatatgcaagcaggctcccctcagcccccaacctgccagacttgcccaatagctaaaattctgccattggcaatttattcatttttccaattgcagcatttgcttagaaggacacacagaaagcctagtaagtgttcggtaaatatttgttggaatataatactcagtagattccgcacccagcccagcttgattttcttaagcataaaatatagatctttttctttagactgaaaagtagctgaggactgagaatcaccctgatttttttctttaatcagaagttaggcaattgattgatcagaacaatattgtcttgttttaggccaggcgcagtaatctcacgcctgtaatctcagcactttgggaggctgagatgggtggatcacttgcggtcagaagttcaagactagcctggccaatatggtgaaaccccatctctactaaaaatagaaaaattagctgggcatggtggcgggcacccgtaatcccagctactcgggaggctgaggcagaagaatctcttgaacccaggaggcataggtcgcagtgagctgagatagtgccactgtactccagcctggatgacagagcaagacttcatctcaaaaaaaaaaaaaaaaagaacaatattgtcttgttttaccatctctcaaggatatcaagtgctggtggtaacttcacattccttcagcatataaggattttgtagaatacactgctgatgttttcctctttggtgttccaagttaattacgattgaatcttgactaccttaaaagtacacgttgtttcttttgtccccaaatcggtggttgactaaatgccacagtaaaataacattattaagttgtgttaatatttaatgtcttctttgaggagttaaaattacaatgaaaaaattaaagttacttctcagttttcctcgaagaaagaaatacaacacaagagctccacacctctgagatctcccactgtcagtgagggatggatgcagacagagctctgctctcagaccgtctcctagcagcctgctggaggagcttggggaagtaggaggtgcattctgtggggtctctctggaaagggtctggagagtggagtgggcccaaaggaagggagagatgtgacacaaatgagagcagaacagtcaatgcagaaagagaagttggagccaaagccctgagttggggagaacccgggagctgattgggcagcagtgagtggacttttgtggtcagaacacaggctcaggccaggcaaggaagaggagcaggaaatgaactgagcaaggcaggggcacttgcttgtgggatggctcagtgccaaggcccgatctccttctgcaggtaatgggaagctagagagggtttaaagcaggaatgaggtgggaaggcactcagaggagactgatgttaccggagacatacttgtggaatctctggcagcagtgtgtgtgatgggccagggctggggctgagtgaggggatttgccaggcagggaaatcagctgggggctggcagcaacagtcctctccagctgctctcagtggggttgggatggagaggagaggactgatgtatgagaatactggttgggggttgggtaatctcaacatggggactgctgctgtgggaggtgggagagaagggaaagcatgaggtgacttcagagtttcaaacctgtgaggtgtccaggggaaaataacaaggcatgcctctggcactgatgtagaagtcagactgtggcattccaggaagtgaaactaccaggaaatcgggaaaggcactcagaggccacaagtcactgtgatccaggacaaagttttccttaggtcttggagagctcaacattcgaaatggagagggcaaagggagacctttatctgctgtgggaacagaataaactgtctgggttctgtcctgccttcctcagaacgcagcacagctatcctgggatctccagtgctccttaacagatctagttatcggtccccacgggcactttctggaacctgtagaataggcaagcattaaatgcagtcattcagacttcctcaccctaacatatccttttgcataattggctttaggtctagatttgattagttaatgattctagaaggcctggagaaaataatgccatggttagccggccctcctgagaacagatttcttattcaccttttttgcctgctggaatctcctgcacatgctgcagcccacacagggaagcatgaaactcacagcctgttaacaactctctccctgcaatgtccaaagcaccctcagcccttagaagtatggacatcagggagccccagctgcaggaccctctctgcccctccctccccactctgtaccaatcatggagcctgcagaagggaatggaagaaatgacatttccaggacttaagagtaaggtattgaaatttgtagctaggagaaaaaaaatttgtgggctggactccaggcaaggctctgccttcctcctttccctgctctgacttcaggccttgaaatgctcaggaaagagctctaatgctacaagagcaggagatgctcaaggctatctctgcagctccccaccctcttccaccaagcggccactcagatctgttttatataccacatcgggcatttaatgtcagatttcatttgaacaaaggcctctgtgtgggaaaaacaacctggacaatacttaactttaaatcctggcatttgcatgattcttaagttaggcagagttctggatgagagcagcaggagaggaacccatgaaggtacaaatttgtgaagctgccttcagaggaagagaagataagaaaggtatcttagaaggttagaaagaatccagtgattggggttcttccatagcctttcctacaagccagggatacctgagccttttctttttgcagagctctttcactctgatgcaagttatctggtgtggcttagctggaaatactgcagagagttagaccgaaggactccaggatgggcttaaggatggctagatcaggaggtccccaggcagaaccacatacgttccacttagcagaggcagggtgcctctgggagctggatgggccatggggacagggcaggcagggggatggctttctggacttccctcaggcttcttgcttttcctggcactggatctccccctttcttgctctttcggcttcagccactattggccacctaatttagatggcctcctcccattcctgtctccatttgtgaggctcagaaaacagtttctggccaggtgcggtggctcacgcatctaatcccagcactttgggaggctgaggtgggcagatcacctgaggtcaggagttcaagaccagcctggccaacatggtgaaaccccatttctaataaaaatacaaaaattagctgggcatagtggtgcacatctgtagtcccagttactctggagactgaggcaggagaattgcttgaacctcggaggtggaattttcgcagtaatgcagtgagccaagatcacaccactgcactccagcctaggcaacagagtgagactccctcaaaaaaaaaaaaaaaaaaaagaaaagaaaagaaaggaaaacagtttctgcttgagttgatacaggataagagaaggcactgagcaaggaattttaaggcgtgccagatttcatgcctgttgtcagtgttttggttcaagaaggatgacttcttggtagaaactttcttatgaaagaaaatatgtaagacctttaaaggggatagtgggtaggcaagcaggcagatcggctgtggctctttttcttggaatactgtctccaagtagttctggtccctctctcctagaaggccccttgcccacaaaaagtcatgtaaaacttctgctcatccttccaaatatggacatttagtgggaatgcattaaatcccatcttctcgacagcacccttgccctccaggatctccccattccctgagccgctgcagcatttggttattgtatcatcacagagcctttgctattctacgcttttatcattttccctttcctgtgctttagttctctcttcccaactagccctcatgaacttagagactgttttctattaggtacacagtgggtgctcaatttgtgttaatggattgatttttcaccatagtcaggtggcaaaagaaacatgagagtacgctttgaaataagaaagcttcagaacaagcaggcagaccctctctgctggaaccagctcaagggacagcgtttttcactgattcataccaactagggtggcagtcttgctgactcgcacactgtccgggtctggtaggctgagtttgcagcctgtagtgttgggtccctcctcactcttacctctgaagtcagggtcttggattacaggaccagaaagccagcctggggctgcagggaccatgcccctgggttatctgggagacaccaaaggagcctcctgtgcttggcatggtgacccatagagactggaataacaatggtgtttaggagggaggtggaagaggggaagtaggagcgagatgtagaaaaatgagactcagaggttagaggagggagcagtaggcaagtggcattgtgaggttgagtccaagcagccatgtagccagggcaaggcaaagaaggaaaaaaacaacatctgcacacatgtatacatgtgtgcatcatcgtcacccacacagagcccgtgagccagcatgaaaggatgaacacttctcatatgccccgacccttgagcaaacagggagggaagcctgggaggagagagatagaaaggcctgggtcactgtgacattttccagtggccctatggagtgagacagctcagtcagcaaagccccagccctgtgggacttcacactgagtcacagatgattccactcctggaacctctaaggctgcccaccagtctcagacccgcagcaggccctgtgcttttttcagttcctgccagatcacagagtcaggcactagaagggctctgcaagtactgactgcctcccccttcctcctgccttccagtaggctctttcctaatcgactcaggtatatcgccttcaaagtgccctttctgctctgtggtgccagagcctggccccagactcaatattgtagatgtaccaagtacctttttctaaagaagaatgacccaaaaaagttaagaatcactttactagaatatatcctcctacctatctccaagcctggcctaaattcctcttcagatgagttaaacttatttgcctccatcatttctttttcttcttttttttttttttgttgttgttgttgttgttgagacagagtttcactcttggcgcccaggcgagagtgcagtggtggtgcaatctcggctcactgcaacctccgcctcccgggttcaagcgattgtcctgcctcagcctcctgagtagctgggattacagacacacaccaccatggctggcttattttggtatttttagtagagatggggctactacatgttgcccaggctggtcttgaactcctgacctcaagtaatctgcccgccttggcctcccaaaatgctgggattacaggcatgagccaccgggcctggccatccatcatttatatgtgtctactttaaaattctaaattggggctaggcaccagtggcacatacctggtaaatcccggtccctccataagctccccttttccagacttctatctatttcttttgtgcgaaagctatcctcacccacaagattagattcctgtatatcttaaccctactgcccaatacactacctgtattccccatacccacacaccccacacccaacgacctatccgacaaattcgtttccggggactccattcctccccacccctccgccccctgccttccaaccgttgttattttcttactatgtgtcaannnnnnnnnnnnnnnnnnnntgggaggatcacttgagcccagaaggtcaaggctacaatgagccatgatcatgctactgcactccagcctaggtgacagagtgagaccttgtctcaaaaaaaaaaaaaaaaaaaagcacaaaaccaaaactctaaattgttttctgaccccttctcttactcctacttaagatagtctatagatttttcttactatttaagtatgagatgagaagtggtcagatcaagggtattcaatcattcacttgttcattcattcaacaaatacttagaaagtgcctgtccgccaggcttgtttcatgtgctagtccaagccaccaccatctctccccagacttctacagcctggtcttcctgcctctatttttgttcgttgcaattcaggctcacttcttcaggagtaaaacagatgatactgctcttctgctcagaactctctcttggcttcccatcttaatctgggtaaaacccagactcctaaggcaacatataaaatcctacccagtccagcccctgccgctcctcccctagccactccagccatctttggggttttccaactccagagcccattccaacctcagggcctttgcagtagctgttccctctgcttggaatattcttcccttgtcctgcatggctgactccttcatatcattccaatctcagcttcagtgtcatctgcacagggggcctgccttgacctctcagactacagtaaccacccagttatttgctatcattcaccccactggtttaattatctgcataattttatttatttgttatttgtttctctccaccggaataaaagttccaagagaggccgggcgtggtggctcacgcctgtaatcctagcactctgggaggccgaggcaagtggatcacctgaggtcaggagttcgagaccagcctggccaacatggtgaaaccccttctctactaaaaatacaaaaattagctgggcgtggtggtgcatgcctgtaatcccagctactcgggaggctgaggcaggagaatcgcttgaacccaggaggtggaggttgcagtgagctgagattgcaccacttcactccagcctgggcaaaagaacgaaactctgtcaaaaaaaaaaaaaaaaaaaaagttccaagagtgtaggatttttgtcttgtttgtttgctgctatattctcagaacttggcacataatagattctcaataagaatcactgtttgatgatcaattgaatgaatgaattgaggaatgtatctatcaaagtagttaaacccagtaagaagcttagtgtttttcagatctacctggtgggggagctgtttggattttatgttatgaaattgccctgaggtcacagcattttcttattatggcagattaaatcgcctgccttagtcctgacttcttcctagagacattaattcaaacagctgatgaggaactgatgaagcatctactaagactggccactgtagaaaatcctggactaactctgtgtctcccttgtcactccatactggatcatgcaggatggaatttcttgagcaagagtttcatccatagggacccacatgcctagcacagggccggccctgggaagtgcccagcaggtggatacttgtcagttgcttatcaggtcccaggtgagagaccagagccaaggctacatgaatcgatctggaaggcctaggggaggtggccccttcctcccagagccccgtctgctctttcccactctgagcaggccagtggggggacaggggaaggagaacctcatcacctccctcttgatgctcctgtttcattttatcccctttgatcctcacaacactgtgagatactttattatttcctccattttatttatatttttatgtttttaaaggtggggtctcatggcatcactctggctggagtactggtggctgttcacaggcacacttgtagctcactgcagtcttgaactcctgggctcaagggatcctcccacctcagcctcctgagtagctgggattatagggacctactatacttcctccattttaaatgtgaatatgcagaagttcagagagttgaaggaatgggcccaacgtcccaaggcagataagtgtcagagccagagttggagctccggcccctgtggtgacagaggccttgcactctcagatcctctctgagacagggaaaggagtccaaacctggcatctagtttagaacccaggagttaagagaaaggggtgcattgaaggtcttctaaactcactgttgtgtttgaaagaagacactggagtcagagtgtaagaaaatgggttggggaccagagctgagataccagagtgtgccctggggaaagggaatagagggcagatgcagcaagaggcggcaggtggtcctctgtcaaggctgctgctgttcctgttctccagtgcccctcctaaagggagggaatcccaggactcgagggttttagagcctctgacttacagatgtggaaactgaagcccaagaaaggtaaatgatttccccagtgtcacataatgagtagaaaaacgaggtctacaacacccactcctgaggcccaggacagtacctctctactgtcccccaagccttgatttatacagaggaaatgacagaaatgtagggatgccccctgagaataatccagactcgggtagagaggagctggcaggggtgagatggggtggtgtggggtaagggcagagaagatggaacactgccttgagaagagggcttggaggaactccagcaacactggggtgggaagaactaagtgttctgtgaaaccagccatctctcagcagtcagcaatcaaaccacaccctgagtcagcccgggattccactgccttggtctctctgggcctctctccgtagctggctgtgtgttcttcagtattgtcagtggggctgcaggggaggaaacagaagaggctaggaattgtggtcctaacccactgtgaaccagtggagggtgaggggaaatgcttttgaaggaagatagttatgtgggagccagttatctgttttcttatttattccttcaaaataaagagatttgatcaaggtaggcccccattcctgccagctgcagtgggtgggcacggtggagctccggttgccgcattccaagttgcgtgtgccatcagttgctgttccagagagcctgggccccctgacgttcacctgcatctcagcgagtgcgtcactggcagcggctcccatgatgtgcaaaagcaggtgcaaactaatgctcccgtcttcgatctgctggccagttatgagtgccagtgagtaccctggctgggcctggttgctggggtgatgggattgttaccatggcctcccagtgactaatccccagagagacaacaacaggctcctttcgaggaaatgagggtcatttttgcatcattttgccctgactcttgctgcttctgaaagccgagctctctggccaaggcgactgacccctgtgggtgatgataagccctcagtctgaggcttaggccatctggtgctgacgcggctgcagggtgttgtcttccctgttagtcagggcaagcctggtgcctggtgatcttccttctccagctcgtggcctcggctctcctcttctgtgctttccttttcctcaggaactttcgctttcctcagcaaggccatatcacaatgcaggatttctcttcactgtggtgagcaggcttcctttttgaacctaagccagtttcaggtgttagggtcactactctgtcaggggtggcaagatgggcccccccacctttctcgttcgtccctggttcagtgaggatgactcctccagccccagcttcaggcctgactctattgggagcatccctcctgagcaccccagccagcactggcacctgccctttgccctcctgagttcactcagccacagacttcttccatcccaacagccagatgaaggtcagacccaggctgtcatgacagtgctgcccgagaagttctgcagggcaggggtggggcccaggagaggcctcttcactggccacggtggcgacccctccctcaccatcctgctgttatccaaggaggcgtaaagggtgacatcagagacctgggaagccctcatcctacccaccaaactccaattctgttctcaaatctcccagaagatgcttggtggattgtgaaagcctgggcttccttgtttttgctgctctattttgactacagcagtccccatggcaagacctctcatgggcagaagagcagaatggagagtggctctggtggtggcgggccagtacagggagggtttttctctgcacacgtggggcagggtgtgtacattgagatagaatggcatgttgggaatctgtgcacctttcagagtgtctgtttgtaaagagtacacagccccagtttggatgtgaatgtctgtatgagcgttaggaggagaatgggattcaagagatgtgctctgacctgttcactgatgcatcatgatgagctaaaagtaagaaatccctccctgaatgtcaaaatggccaggaaatcgttgctgtatttcagtaattgggtttgtcagaagtgaatttcttgtgaggctgatctacaggagcagaggcagagaacagcaggtgggaatcaaaaacaaagaattggccttgacggcaacttgtcttctccctctctgcctcctcttcccttgttcctttccccctctcctgcttcctcacctccagctgaagtactgaagttactggagtacaaccagggctgtcagcttggggtgtatcttgaaatggactttctgaagtattttctggggtttcaagcatgaaacagctggtgttttagtcggggtatagatttggcatctgtaagagaagttaatagtggcttaaacaagtcagtagcttattttttcctcacacagagcactcagtagactagtgtgatggtccgtatgattaggggcgcacaccttctttcttggtgctctgacattttcaagacacaccatccctcacatggccccagatggcagtgccagctcccactgccatgtccacaatctggtgagccggaaggcaggagggaagggccagcctggaagtcacatgcaccacttccatggatcttatcagccaggccctcgtcatctgccacagatctcagccaaagaggctcagaaatcgtgtgttgagctaaatggacacacgcttagctaaaaagcccatttctgtgtaagggggaaagactgggttttgggagataggaacttcacttctcgcaatctgccatcttcttatttttaccaggtcctaatcactgaggttctggcaagtgccagctgcatgggcactaacatctggggacacagggatgaattagatagagcatctgcttctaaactgttgggagtccaccctctcaggtggtaggccacctaaaatcaacagaccttcctttacatgtatccaaatcattttttctgttagcaacttacatggctaattttataagaaaaggaagtaaccattaataataagaattttgttctaaacattctcactaacttggtaagtttgtttgctgatccctgtatcatctcttaggaccacacacatcacccaaaatgcagacacttcattaggaagcaagcccacaagctttgcagttgcattacccagagcaagaatttactagaaagatagctttttaattgaaggggactgggaaggaagaaaacacttagtagagaccaaaaaaaaggagcaatggcgggagggagggagccacacttagaagggagcaggaatggggaagtggagaggggaggctcaagtttggcaccctgcctgttccaccactgtgcttatgcgtggcatgtcctccttgtgccagtcaacctggttaagtgtcgcgattctacccagccccatgccctcctttcccacaaagcctttccagtctttgtgtctctccttgagtcagacccacactgtttagctcttacattgctcattctttaggagactcctcctttcacccacactaagctttttaagggctgaggcctccatcacagcagagtggatcatgttgttttttgttttttgtttttgagagggagtctcactttgtcgcccaggctggagtgcagtggcgctatcttggcttactgcaagctctgcctcccaggttcacaccattctcctgcctcagcctcccgagtagctgcaactacaggtgccagccaccacgcccggctaactttttatttttgtttttttgtttttagcagagacggggtttcaccgtgttagccaggatggtctggatctcctgaccttgtgatccgcccgcctcggcctcccaaagtgctgggatcacaggcgtgagccaccatgcccagcccggagcatgttacattctagagtggctcatgacaggcagacctattgtttctgtagcacagcctggttttggagttgaaagtggacatggggtttgagatgggcagcttcccttcagtcagtcccctgctcagcctcccggcaagctcactggccccagcgatgagcctgtagggtcaggttacactgggacaggttggtaagggctccccaggcaacccagtcccatcacaccagaaaatgaaattcccctcttttaaaagccactcatagaacatagtggtggttgtggtggttctgcttcagaccctcaagagtctgtgtgtgtgtgtgtgtgtgtgtgtgtgtgtgtgtgtgtgtgtgtgtgtgtgtgtgtgtgtttcaaaagtaaaaaaaaatcggattatcatcctcgcccccttaatctgttccaaatgagaacgcttaggaagaaaactcccaagaacccactctgttaagaaaattggtttctgctgtggagtgggtcagggtggggaatggagttaggaaaatatatggaaactgacagaagagattcggtttgtgtttggaaaaggattcgggttgttttcaagttttgagttacagcctgggcgtgtttgaagaagtggggttgtacagcatagcctctgtgggcttctcattcagctcctcctgcctgcccggcccttgttagagatgccttgcttggcaggcagactggctgggaaccttcttcataaataactccgtgggggatacaggagtgataacagacgttttaagtggaagcccagctgccttaagaacttaggaaagggcccggcacaagtctggccccaggattctcctcgctaagcaagggaacgctcttaaagctttcagtttggttactctaattttattatttctctaacctctctaatcagcagagtgattgaggctctgattgtgagtcctgtttttatttttcacactatttttatactttgaagctgtggttttaaaatatacactcaaaaatgttggctcggcacccacgaggcccaggaggttgtccagatgcactgggtctggggctgctcccagcagcctttcagtgcccccgcccccaccgctggcctttggggatagatggaatgggcaggagttgctgtaagagactggtccaaccacaggcaagcttctggccaaatattttaaattcgactctgagaaactagcaggaatcttgttctggtggcttcccaagcacacactcagggatcagaacctgcagaagcagaattcccagtttcagataaaatgttcattcatctccaatatgcagtgctggtccccatcgcccttccatccatgctgaaagtgtgtgcagcacggtacttagggaaaaacagtgccagcaaagtgggttcatttgtttctgtcaccaccatttgctggaaatggttgtcatgttcacggtactgtagaactcagagatgggtgcaagaaatcttccaaagcgctgaccttcctgtgttcttctccagctagttctaaccctgccctctatcctcttgccctcttttttcccccaggctcctcccttcccttcttttctcccaatccagagtagatctaggaatctgaaatttccaccttggctacaaacagcactgagtctctttgaacagccttgtccataaatcttagattgtttttcatctttgaaaaagttacttctggcccagcacggtggctcatgcctgtaatcccagcactttgggaggcagaggtgggcggatcacctgaggtcaggagttcgagaccagcttgaccaacatggagaaaccccgtctctactaaaaatacaaaattagccaggcgtggtagtgcatgcctgtaatcccagctactcgggaggctgaggcaggagaatcacttgaacccgagaggcggaggtttcggtgaactgagatggcgccattgccctttagcccgggcaacaagagcaaaacaccgtctcaaaaaaaaaaaaaagaaaagaaaaagagaaagctacttctatcagcaagtcattattcacatgtaggggcagggaaaagttcactacattcagacttcagtttcttttcactctatttcacaacatccactcccctgaaaccatgggctttaaaaaaaaaaatcagtccccaataggcaaggtgccccgtgacatagccagctagaaccagggaagaaggtgagagtaagggtaggtttgcctagatggaggctagctgtctcagcccatggaggaaaataatttcagtctcagggaactaaaaacccactgttcttattttagagtgatggatttggtgggtggggaaatttggggagacagggtgatatttataatgaaaggcttagctgtattgttgaggggtggggtgagaggagggagagcatgaggaaaatagctaatgcatgctgggcttaatatctaggtgatgggttaataggtgcagcaaaccaccatggcacacatttacctttgtaacaaacctgcacttcctgcacatgtaccctggaacttaaaaataaataagtattatagtgtaatatagctaacaggctagaacatacctcagttccatgttgcatcagctaaaggagagatgaaaggagggtgaatttggagcaaatagaagagaaaggaatgtggggagagagaaacagactgtcacttgaggacctggcttggtgtttctgcttctcatccttagcatgttggctctttgaccccgtgcttgtcctcatggttacaagatagcttgtatacctcggatacatcccaacattttaggtaggaaagaagggataagaacatacatttttcttctcacggggttctttttatccaggtatttaaaatgcccccccaatcacccacccacccagcatatatttctgtatgcatccttggccaggtcaggtacatggccatcccagatatgagggtaggctgaaggagaaagtatcatgcaatggagaatgagacggctctgggcatatcacttggaactggaaccatcacctcccagaacaaaattggccttctattaattagcaaggaggaagtgggatagctgttggatgggctactggggagggattagtgtatacccaggaagtgccgtgacacatttagggaactacgtgacacatttagtccagcacgaggagtgtcgagttggggtagggtgggagaaggacaaacactaaaggtagatagggaccagattttcaaaggccaaggatgccctgctgctgacttggctctctatggaagccatcacaggcgtaaggaggaaagtgggagatgattgcacattacacagaagtggggaggggacgccagtctcaagagcagtggttttcacactgcaatatgtacacagatcacctgaggatcttgtcaaaatgagattctgtttctgtgggcctaggtaaggcatgagattctacatttcgtaaaaactccccagtgatgctgacacagctgatcaggggatcatacttggagtagcaaggtcctaatgttcttcaaaaataaatgtacaaatacgtttgttagacattttatagtaactactaatataactgaaatagaaattaacactctcaaatcactaaaggaaaaaaacacgaacttagattgagttttctttttaaagaaaggcaaaatctgatgtgtcttttggtaatcctgatgtctacatgtgacagaaaagccaaacagaggtttaaacacagtggaagtttttttctctctcaagtgactgcagtccattccatatgagtgagtccagactgattggcaggccccaggccccaggccccatgcttcttctgtctttctgcttcactctcctggcatgtggcttccatcctcaaggtcacctcttcatccatgatggttgccagaagcattagctagctcatcctcataacagatgaaaagaaagggaagaaagaacaataaagagtgtgcatcctctcctttcaaggagtgcccccaaagtcccataaaacacttctctttacctctcattggctacaacctaataacatgtccatattttgctgcaagatgtgcaaagaaacataatgttttgggctaagcacattacctagagttcgcttgctaaggaagaaggaaacacatccagctctatgtcactttgataaagagataagcctaaatttacaaggaatggttgaaaataaagaaatgcacacccagcactttgagaggccgaggcgggtggatcacctgaggtcaggagttcaagaccagccttgctaacgtggcaaagccccatctctactaaaaatacaaaaaattgccaggcgcggtggctcatgcctgtaatcctagcactttgggaggccgaggcgagtggatcacctgaggccaagagttcgggaccagcctggtcaacagggtgaaaccccgtctctactaaaaatacagaaattagctgggcatggtggcatgcgcctgtaatctcagctacgtgggaggctgaagcaagagaatcgcttgaacctgggggagtggaggttgcagtgagccgagatcatgccatttcactccagcctgggcaaaaaagcaaaactccatctcaaaaaaaaaaaaaaaaaatcaaaacaatagccaggcattagtggcatgcacctgtaatcccacctacttgggaggctgaggcaggagaattgcttgaaccagggaggcagaggttgcagtgagccaagatcgtgccattgcagtccagcctgggcgacagagcagcagtccagcctgggcgacagagcaagactctgtctcaaacaaaaaaaagcacaaaccaggcaacatggcgaaaccccatctctactaaaaatacaaaaattagctgggcatgatggtgcatgcctgtagtcccagctactcaggaagctgaggtgggagaattgcttgaacccaggaggtggaagttgcagtgagccgagattggaccactgcactccagcctgggtgacacagcaagacctcttctcaaaaaaaaaaaaaaaaaaaaaaaaagaaatgcacaaatttatttcaggcaattggtaacagaaagaaagcaggagtggcaataataatattaggcaaacaaatttaagacaaaaagtatgaagatggacaggaagagaagcattggataatgataaaagttatccacaaaataacaggcatgagcctttacatatcgggtaaaataacatccaaatttaccaaaaaaaacactctacaaaatattagataaaagttattaaaatacagccatagtaggatacttttcctttctcagaatgtaaaaggtcaagccaaccaaagatgaatgaggccttaaaggatttaaataccagacttaaaagtttgtataggtataaaccttgtactctgacagaaaataaacatccatttcaaacagctacataacatttacaaaaactgatcatatttcatgttaccaaaaaaatttccatttcataaagaaatcttcctaggccacattctgaccaaattgcaagcacactagaaatataaaataaaaatataacaacataatgccacttagatatttaagcacagtcttctaaatacgttatgccaatgacaacacaaaaattaaagactccttagaggcccatacagaggaaaacacaatcaagatttcagtagatgaacctgtcttcagaggaagtacttgcattgtacctcctgggctcaagtgatcctcccacctcagcctcccaagtaggtgggacttcaggcaatatattaggcaattaagtttttatgaataatatacgaggaagtctttaaaaataggtaaatgaagacaatagaaaaagaggcaaaagataaaaaccgagcactctgtagaagaaaaaagatgtgaacaggacacgcatgaaaaaaatgctcatcctcactaataaaaaagaaataccaattagaacatcagcaccctgtcatttccctgtatcttattggcaaagaataaaaagattgttcttggccaggtgtggtggctcccacttgtgatcccacactttgagaggccgaggctggaggatcacttgagttcaggagttcgagaccagctggatgtggtggcgggcacttgtaatcccagctacttgggaggctgaggcaggagaattgcttgaacccgggaggcataggctgcagtgagctgagatcattccactgtactccagcctggacgacagagcgagactccatctcaaaagaaaaaaaagattgctgtcacctggggtgagagctgtgaaggaacaggcatgatcataccaggtggaactataaattggtacatttttagagagagtttaatggtgtctatagaaatttaaatgtgtatgccaattgagccagcaattcccttttagtaaatttatcctacaggaatatttgcacaagggccaaagatatatgtataaggtattcctttcaacagtgtttataacaggaaaaggaataacctaaatattcatcaaaggattagttaagtaaatgttaatacctccacatactatgcagcagttaaaaatggagtaaatcagtatgaacccacatgcaaaggcatccgtgatatattgttaactgaaaaaagcaagtcagaacagaacatctggagtgattccactgtcagctataataagttgttattattctctataactctgtaatctttttaagtctagaaagctccatattatgaattactgcctatagggcctctgctgcctacaggggcctggcaaggagcataaatgcgtgaactggcaggacgtgcagtcagagtaggatggactggcagggagcggacaatcatgtactatctcagttgtagccaatggttgtgattcctgaccttgccaggtttccctggccagcattcatggatcaagactcaggagcagtagctctgaatttagtagtcttgagtagtcttgagtttcagccccaagacagccttttctggccccctagcaagggcagtagtagtgacccctatcagtatcactttgggtcctcttcagcaagtgctgggtgaacctggagcttttagttgatggcagcttcactgaccccctccccttgacttggtgaaatgggctccatcatgtcactctgaaactgacagcagttgacattaagattttttttaacaccatagaacttacagactgtgtttcattttggcctggttccttagtgctccagaaggttcactttccaccacagaacctccagaatcttcaggaggcctcacacaggccaagttacccatagtcccaatgtgagccctgtgtagagttactgtttttagtccttctaacctttttggcagggggagggggccaaaacagcctcagctgtactggaggagaacagctggaaataaacagccaatggatgagaaaacttgagggtcgatatcctccagttgccaagttctatcctgcttagcaaagtctctgtgctgcttcattcttcatttctaaaagtgaccttcaacttgatttccccctggccctcagtgtaaatattggcctggtcattgaggtcgtccaaagaatgatttggtctcttgtgtaaggttgccagatttagcaaataaaaatataggacacccagttaaatgaatttcagataaataacaaataatttttatttttatttttatttattaatttattttttgagacagagtttcactcttgttgcctgggctggagtgcaatggcacgatctcggctcaccacaacctccacctcccaggctcaagcgattctcccacctcagcctcccaagtagctgggattacagggacccaccaccacacctggctaattttgtatttttagtagagacagggtttctctatgttggtcaggctggtctcaaactcccaacctcaggtgatccgcccacctcagcctcccaaagtgctgggattacaggcatgagccaccgcacctggccaacaaataatatttttttttagtataagtatgccccatgctatatttgggaatacttacactaaaaggatatttattgtttacctgaaattcagacctactcagtgtctcgcatttaatcctgcaagcctgctccgtgggccgctggggctctccctttctaagggaggcacctgaaagtgtgaggatcaagagcagtaggaggtgtcagtaataaacctaataagcactgtccagggcatgacacgtcacctcagccccagagcctgctgaatccccaactcctgcttttctgtacctccccttcctcccactggcttctctgcttctgagctgcctgcctctggactttctcttttagtctgtgactttcccctaccctcacctctcctcttttttcctcattttgctctcactgatccgtaacacgtaattaaagtttacatatttgagtgttggttgtaattactaaataaggttttatgttccttgctgtaatttaaatagcaggggaatttaactttttgtgtgtgtttcattttgcttttattgataggtggccttaaattcatttttagccatgtgaatcactgaccttcaccttgagctgagagaaaggccttccatatctggaatgaactcatgcacatcttcctagaacagatgccaacggaggaagtggggaatgggatagactgaggtggtcgagtgaagggagacatcactaggttgacctattcaagagagaaggagactcggaagcctcctgtgctgccccgaagcccagccttttggaattgggccccgctggcccgggagaagcctcctctctcctctttatgattgattgcctgactcctatgcagtgagaagcagcctgtcatagggaggcgcagggtttggggttagagacaagcgccccaggggccttgtgccttccctctctgcctctcccagtgggagcagacacttgaaggaaactccactctgtcccctcccaaaacaggtagtctggacaactttctgacgtccccctgtgttagaagcttctggttgctagttgctaccttcaaggactctgatgtctgttttctctcccattctctctgtctgcctttgtttttccatcccccctctccacccaccaacagagggacctctacctgtctaccagatgggaggcgttttcccatctgggaagaaaactttgaaggacagttgccatcttggagagagaatactgatctgggaatcagggagtcctctctatcctgagctatttggctctactctcttggcttcagtttctgtataaaatgaaggtgattttgtttgtattaaaatatgaataaaaacgaatgttggccaggtgtagtggctcgcacctataatcccagcattttgggaggctgaggtagaaggatcacttgagcccaggaggtcatgaccagcctaggcaacgtagtgagatttcatctgtacaaaaaataagaaaattaggggggcttgatggtacacacctgtggtcccagctactcaagagtctgagggaggaggatcacttgaccctgggaggttgagaccagcctgggcaacataacatactctgtctctaccaaaaaaaaaaaattatttatttatttatttatttttctttttttaattagccaggaatggtagcatgtgcctgtggttccagctacttcggaggctgaggtaggaggatcacttgagcccactaggaggtcgaggctgcagtgagccgtgatcatgcccctgcacttcattcagcctggaagacagactcaaaaaaataaataaatacaatgtcaaaaagtgagcaaggttctatccccaatccaaatgctaactggtttaaaaaaaaaaaaagtagaagagagacaaggtctcgctgtgctgctcaggctggtctcaaactcctgtgctcaagtgataactcccaccttggcctcccaaagtgctgggattacaggcatgagccaccgcacccagacgtaagcgggtttctgtttgttagagaagccttttcttcaccaagttaagaggaccttaccacttcattttgggaggagtgtttttattccttctatcttggattcatgaacatccaggtgttctttcttacctcttcttacaggcaggggagaatttaaaagagcctgaaagaatagttatgtgccccttgacatttcagcaaatgtttcagtagaaaggagattggctctttcaatagttcacctaatggtctgtgaccgagctgaggtgtcttcttgaccctgtaaaggaggcagctccatgagtttgagggctacacacgtcaaatggctgtagttgcccaaagaattttggatcagatctctcacctttgatgggaatgaaataacaaagcctcacccacccggggcctgttgccttttgctgagcaaagtcctgtcagccgtttagtacagacagaggcttcaccccagctggaaacccgataatgagtgaggcctaagaatctgagcttcccggggtgtgtgggaaaccaaatattagaggccacagcattccccgactccaatacttggatggagcttgtgcattcccttggttacagccatttggggctccaaaaggcgggagaggtttagccagagcctcctctcagcagttctggggggcccaatcccttgtcaccttgaagttctgtttaatccttcaccttcacagcagcaccacagcagtgaaaaacaatgaaagtcagccacacccgtggaaattcatgtcagggaaagaaggcaggaacaggatcaaagcctcttgtaacccaagaattcctcagcagctccagtcccttaataattatggtttggagatttgccagaaagcaaaaccacttagcatgccatatttaacaatgaacagttttctgtgttcataatagtcactgtgcagagcaaataggcaccttgaacaaagagtaggatatttatatgtgtatataaaataacccgcacctaccttaaacctaaatatgttttcagagaagaatgtggtacgtccctctgctctggtacctgctttatgagtaagttggagaaaagctacatactctgcccccatccccacctccccaggtttttaaaatagaaatatttgtttaacccagaatttcccaaacttactaaatagttacactctttagtttccagctggagtaaagctgctttggttggttttgaagtttggagtgttttatgttgttttaaatatctactaacattccaaaaagccagtgtccccagaaaaactttttgggaagtgatgaccaaagagtgcaggagacaaggatgtagaccagtggggggaccgagaaaacaagtcccaagccctgaggggagatgaacaagtttgctggaggcccaggtctctgcatcaggtttaaggaaccttggatccaggttctccatgtcactgtgtgttcagttagactttatccaacaaacatttgtcattgggggaaattagagaagaatggctgcttggaggaaagttcattacagccaaaccttaaaggatgggcagaatttcaagaggaaaagatgagaaagatggagaacattccagaaagacatgggtggcagagtatgaggcctgttcaggaaaggaatgttagtgtggtacaagcatcgagtgcgtgagtagggtggggtgagatgaagcgggatgacacaaacgacctttggatcaaataggattctttcagatgcaagtgacagaatgtccaatgcagcccacttcagcataagggaggcatactggatcgtgtaactgagaattccaaggctaagactggcttaagacatgacataattcaaggactcaaacagtgtcccaaggacctggtttcttgtcatttctcccttctgctcctaggttggttctgttttcgatcagctcacacttttcttggagtttaagatggctacagcagctctagcctttacatcttcatttattcaagtccaagtcctgtgtcagtacaatcccattgcattttattggctctagttggggtccaggcctatccctgatctaatctcaggggccagatgccagtgagggcatcatattcctggcctctgagattagttcagggataggcctggaacctgtctggagcgggtacccatgcctggagttgagggtagggttagccccacccaaaccacatggactaaaaggtgtggaggggctgggtctccagagggagactggggacagctatccaaaggagggcgaatggaaggtgggcagcaaaaacaacagatgtctgctaaaacctggaatgctaggccaaagaacctggatatcatttacatcagagaaccagtaaagatttttgagcaaataagcagcgtgatcagagctacacattaacattaattcagctacagtttaatagctgccatgtacttggcacatggtaggtacttaatataattatatattgaatgagtgaatgcaaaaagagagatgagtagctcaggagaggagagagaaattaaaggtgggcagcatttttaggccatcgtagcagtttggaaggggagctagcaaagggaataacgaagacccatcaagaaaaccaagaggttccattgtcatgaaacccacataaggaaaaactatcaagagggcaggtttggtcacccacgcaaacactgttgaaaggtcaggttaaggacgatgaggattgagaaaatgtcatgagtgagagttgagagagaaggttcagtagtgggaggttagagccacctttaaggagtttagaagtaagtaggaggtaggcaaagggcccaagtgttgaccactctgctacatcacctgtcttcttatcctccccaattcaaactcagcaaaaaaggtgctctttcccctgcacacatccttcacacagcaccttatacctcccccatgacctctatccagccacgattccctttcctcccaggcgtcttcaggttctccttctctacctccagtggctccttctcatacaaatatttacatcactcccctgccctaaaaccacatcttctagaccctgatctgtcttcaagccaatgtttcaaaagagtcattagagaagctttgactttgagggggacggaagtttgagcttatgctgaatgtccttgtagaagtcaagattatcaagaatgtcaagtcaagaagtcaagaatgagtggttagggagtaagatgtagagacagggaaaagattggaacagtttatatagaggatcagttaggagtcaccagaataggaagaaaagaattaccagaggacatggagattccagctgagattaaacagcgtgagtttatagacagcttcatcagcagactgccgctactcagctggaattggtggctcaaagtagaacagtagattgggtttggggagaggtggctagggaacattgttgagcctggtggcagatcagattgacaagagcactggggactaggaagatcatcacaggcctggggaatcctggataatgtagaataatagcctgggagagagggcaaggtcaaggatgtggtcaggagtagggggcgtgggtaatttcagtggaaaaggtagaaggttaaacagtcgtgttaggaatattaaagaggccatatgatgtgggagccatagtgtgtagactatgtggcttaaatcccaaatcctaaactgtgtctctctgttataccccattataaaatggggctcataaaacctactttaaaaggtcattataattaatatatatgaagtacatatgatagtgccttgcacataagtacccactaaacgttcgcaatgatactgatgttcatttcaaagtgatgataaaacttagaatttgagatcttgagttgaaacagttctaaataatgacaagttctcagatgtcatcatggttaattgggagtagagtaaaatcagagatggggagtatttgaattgaagaggttgaaaaatggtgaaagcaaatactgggagggacatctttatggatgtggaagtcccagatggggtggccatggcgcagtcattgaagaaggccaggtctgtagccagcaagaatggggagatggttagtatggacttcaaaagagagattgtggggaatggcagggggattatctaggagtggcagaaggagtttgctattccgtccaagtcagagactcagggacagaaggaacagccccgaatggaaaatcaggagaatggtagcttctgccgggaggaggaagaaacacggaaaagatgacacatatggagaatttgctcacaatatgacagattttaattgaggggaactattttttcataagagcttttgagaaaaactattccctgaacatggggacacatctgaaaaaggcatgaggataggggaggaggtaggaggttttggagtagatttctgagaaagccaacagagggaggccctgtttcctcaccatgattgtaaggtgcatgacatgagacaagctggctcaggcctgtgggctggtgctaggcatgccccagctggacacagctccctgtggccctgccacatctcccactcgggagtacacagtcccacagtaccttagattgctgtatttcccagaccggtgtttcgcacgctgacagagacaggaagcagaccaggtgagctgggattgggggcttctgcttttagagagcagagagcaacaaatgggtttaaaggagaggaaacaggacaccagcaggcttcagggctgccttctcttccaagagtgctgctctgtaatgtaattgtatttggacattttttccacatgatgtcagggtatagcctcccttaaaagccttcatgaaaaagcacaactataaaacagactcaggcagtgaaatggaaaccagacgagtggttctgtgtaatttaggtaaagagatttctctttgcagctttgtgatctgatctgatctctgctctctgcataaaactgtgtttcacaggatccacttacatttgagtcttaccatgcaggtgatttcagatgtgaaatgtcttgctttattaccagaaagcaagggttcccttcttggtggctgtgcagaccacccctctcaggctgcaacctttccagtcttcttgtccttgtgtgagcccagaccccagcaaacagggaaggaggcctgaccccttttcactcttgttttaacccctctgttcaccttcgtctgtccacccctcacctcccttcttagggttagtctttggagaatgcatcctggggagaaatactcattgaagaggcccaatccctttaaagcaaatgggcccactttcctgcccattccctttgctttaacgcctcagggacacagaattgaattacccattgtcctctgttcttgacacactatcctgctccatccccatgagggtccttttattttattttattttactgtattttattttattttattttatttttatagagaaacgatctcactatgttgcccaggctggtctcaaactcctgggtttaaggatccttcgatcttggcctcccaaagttttgggattacgggtgtgagccaccatgcccagcccctttcttttttcatgtttatatattattgagatgaaataaacataaaattaatcattttaaagtatacagttccagtagcgtttagtacttttacagtcgtgtgcagtcattaccactatctagttccagaacggtttcatcacttccctaaaaaccctgtacccattaagtagtccccactatcccctggcctctggcaactgccagtctgctttctgtctccgtgacttttcctattaagttttttcatataaatggatttatatatgaccttttgtgcttggctattttcattagacataatgtttacaaggttcatccatgctgtagcgtgaatcagcacttttagttctttttatggctgagtaatggtccattgtatggatctaccacattttatttatccattcatccattaatggatggacatttgtgttgtttccacctcttggctactgtgaatagtgctgcatgaacattcatgtataagcttttatttgggtactgctttcagttctcttgggtatgtacctaggagtggaattgtgggtcacatggtaattctttgacttattgaggaactggaggtcctttcttgatggacatcctccccaggtctgctctgacaaggaatagcaggcatgttccaacctatccccacctcccaagacactgagaattggcacaatgtcatcattctgttagatctggaaataaaccgaagaaaaaagagtatggtcaccacagagatgctggtaatcagaagaaagacagcttggatgggggtgggaaggggatggggtactgagaagattcagggtcacttgaaaagatttgactaaggcccaggaagaacttaagagaaagggactcagccacccagaatgaaggaaattgtaagcctaaaatacccatggctggtacagccaatccactagtgatgagggagggatataagagagctgtgaacttactttttcctgcaactagggggccgggaagccacgtagaaagagtctttaatgttaaggatgtaggacatttgggccttgtgggagcactgaaggcttttagactgagacataatcaggtcagagttgtcttagacaggtcaccctgaccacagggaaggggaaagcttggagtctagacaagactggaagcaaggagcctgcttagaaagctaccatcattggccggccacaacgattcacacctgtaaccccacattttgggaggccaaggtgggagcaatgcttgagcccaggagttcaagaccagcctggacaacatggcaaaaaccctgtctctacaaaaaatgcaaaattagctgggtgtagtggcgtgtgtctgtagttccagttactcaggagactgaggtgggaagatcacttgagcccaggaggttgaggctgcagtgagccatgattgcaccactgcactccacccagcctgggcaacatagttagaccccatctcaaaaaaaaaaggaaggctaccattgttctgagaggaaggatggtgaggatggaccaaggaagtggcagtggggatggagaggtgacaagtttgagaggtgtttaaaaaggggcacaattgtcagacaggttactgtgcatacagaggtgaaggcagagcatgagatgctgtggagaagaaaaagtaaagcaggaagcagcagaggagggcgcctcagagttccagagagctccagagcactgcacacactgccgagagagcccagtcagactgggcacgaggctgagagtgtggggacaggaagcctgtggaagcggcccgggccgctccttctgagtgagggctaaatatggaggagatttgtgtcctttttcttccttcaggtacaaaactttcaaaacggattccatgtgttttgatttcaatattttgacctggaggacactgtgactctatgtaaatgcaaatttctaatctgaattatatgaacattaattcatttcatcaagaaattattttccatcgtaactcctacaatccagtttaattccttaatcaattttctttactgagcgagcgtggtggctcatgcctataatcccagcactttgggaggctaaggcgggcagatctcctgaggtcaggagttcaagaccagcctggccaacatggcaaaaccccatctgtactaaaaatacaaagaaattagccaggcatggtggtgcacgcctgtaatcccagctactcaggaagctgaagtgggagaatcgcttgaacccgagaggcagaggttgcactgaaccgagatcatgccactgnnnnnnnnnnnnnnnnnnnnnnnnnnnnnnnnnnnnnnnnnnnnnnnnnnnnnnnnnnnnnnnnnnnnnnnnnnnnnnnnnnnnnnnnnnnnnnnnnnnnnnnnnnnnnnnnnnnnnnnnnnnnnnnnnnnnnnnnnnnnnnnnnnnnnnnnnnnnnnnnnnnnnnnnnnnnnnnnnnnnnnnnnnnnnnnnnnnnnnnnnnnnnnnnnnnnnnnnnnnnnnnnnnnnnnnnnnnnnnnnnnnnnnnnnnnnnnnnnnnnnnnnnnnnnnnnnnnnnnnnnnnnnnnnnnnnnnnnnnnnnnnnnnnnnnnactggggtggagcgctagagggtcccctttattttcttaaatatcaactttttttttgtttgttttgttttgctttaagatagggttttgctctgacgcccaggctggagtacagcagtgtgatcacagcttactgcagccttgaactctgaggctccagtaatcctcccgcctcagcttcccaagtagcagggaccacaggcatgtaccaccacattcagctaatttttaaattttttgtagccacaggttctcactatgttgcccaagctgggcttgaactcctgggctcaagtgatcctcccacatcagcttcccaaaatgttgggaatataggcatgagccactatgcccagcaccccccttttttttttttttttttttttttttgagacggagtcttgctctgtcgccagtctggagtgcggtggcgcgatctcagctcactgcaacctccgcctcctgggttcaagcgattctcgtgcctcagcctcccgagtagctgtgattacaggcacctgccaatactcccagctgatttttatatttttagtagagacggggcttcaccatgttggcaactcctgacctttggtgatctccccacctcagcctcccaaagtcctgtgattacaggcatgagccacctcacccggccgtgcccagcctttaatagtgattttatttttattcaacaattttagtcagtaggacttttcatgcccagttttagaacttgtgagttttattttttgtgtttgtttccaccaaatcacaatttcccccagtcattgtcttgttatttgcagtttttagtgttactaacaaaatgacttctggggtcggttactttgaatttttttcatgtgctgccattttcagtgtagtctgattatcttcactattaacattcactgaaaagtagaaaacagcctgcctcttcctggagtccctcctcccagcttctccactgaagacctggtgcttaaaggaagggaagttttctgggcagtggacccctggagtctcgaaacccttaagactcaaatgctcctcttagcaggtaatttcaatccatcccgcaacagtttgagcattcctcctttttagttggcccaaaacccagagtcttgctgccctctaaactctgaattgttctcccttccttggcatgttcctgaaaggttttctgtggacctctcccttctcttgcctgccttccaggcttctccacactcagcgtcagcctagggccatgtcagcggtgatttcccatgcctttgggaaatgtagtcactccagggaggctgctggggagtgttggccacaggggacagataggaaaggccttgagagctctggggagtaaactccatttcaagatataaaattcccagaaattttgaaatcacaggcattttcattttgaacactgtttataaatcttaaaatcatgttgtgagtttaaaagtcatttataccttgatttggtcattgcattaccataaactgtatttgttctatttagagctgtaaaagcctagggggtgaggtagggtgcctatagtaagggaactttctggattctgtttttttttgtttgtttgtttgtttgtttgtttttgagacgagtcctgctctgtcacccaggctggagtgcagtggcgcaatctaagctctctgcaacctccacctcccgggttcaagtgattctcctgcctcagcctcccaagtagctgggactacaggcgcccaccaccgtgcccggctaatttttatatttttagtagagacagggtttcgccatgttggccaggctggtctcaaactcctgacctcaagtgatccgcctgcctcagcctcccaaagtgctgggattacaggcgtgagccaccacgtccagcctctggattctgtataagactgggaggcgggtgcctagtaagggaactttctggattctggataaggctgggaggtgggcgcctagtaagcagactttctggattctagataaggctgggaggtgggcacctagtaaggaaactttctggattctagataaggctgggaggcgggcgcctagtaaggagactttctggattctggataaagctcggaggtgggcgcctagtaagggaactttctatattctggataaggctgggaggcgagtatctagtaagacactttctggattctgcataaagctgggaggcagtaatgttaaagtcctcaagagagaaacattatcttcttgagtttttctgattttcaaattctagtcttcagttacacctcaggaccatctgcaccacccacccatatcccaccagtgtgttttgggagccaagcagtcccctttcttgagctctgtgctgtgtttacagtaccttgactgggcacattcttcaagactagcacagtgccttttgctcatgacagctctgttgaaatgaatcagtcatttgcttttcctctctcccacctgaagccctgagtaagctcagagggttgagggtgggagtgggaaaccaggcaggtgacaatgagggccagtgaagcttcacaaagaactcagaaggaaccagtaagtcttaggagctcaggccaagaagacttactttcttataaaagaaagaagttgctgggcgtggtggctcatgcctataatcccagcacgttgggaggccaaggcgggtggatcacctgaggtcaggggttcaagaccagcctgaccaatatggtgaaaccctgtctctactaaaattacaaaaattagccaggcgtggtggtatgtgcctgtagtcccagctactagggaggctgaggcaggagaatcgctggaacccacaaggcagaggttgcagtgagccgagatcacaccactgcactccagcctgggcgacagagcaagactccgtctcaaaaaaaaaaaaaaaaaagaagaagaaagaaagaagctccagtagtgaaataagctgaagaaaactgaagtgacttcaaggaaaggaaaaagagaagtttcaagatccaggctggtcagtgaggaatgtggaatgtgtcctcagagctggtgaactctgcccaggcagaggagaggaggctgatggaaggcagacctcaggttgcccagcacttgccagtctgtggaagcctccgtcactggctcatgacacaggggtagggaggaaagaagagggctgggtgctgccatgtccaggaggagtgctctggggtgagtggccatgcagataggaatgaagtgcaaggcacttaccacctggtcagagttggaggcgatcgaaccctctgggaggctctgcagagtgaaatcatcaaggagcaggcatagggagggactcatctgctgtggagggactggctttgcacttttcacaggaaaggcctgacacagttcaggccccaaaggaatcgtcaccaaatgcaagaatgccaaatgcaggccaaaatggctggacagggcccactgcttgctctgctgtcccttcacacaccagggccccaaggactggcctttattacctgctccagaacagccatgaagcccacatgaacagcccatgggtgccgtaccctttcctgctgagctccagagattgccacaggaaacaggagtgaggtgcacacaaaactgggtataatggaagcacccggaagggctggaggctgtgacagctccaggttgtaagccccctggagaaccacgtctttttcacagatggtattttctgagagcaatatttgtttgaatccattccttatttgctactgtggtttgaagtgaacaaatgcaagtatttttctagggtttgagctgagtgtactgttaactggctataatttatcagtccctttttggtgaagtatgtccctattgaataagaagtgcacactttttaactcttatgaattgcttattttcattcatattggctgtgtccatttttaaaatcaggggaaaaattttatttacccagtgttttgaggtgggcccacatttttaaaatcatagttattttaactttaaaaataaagattttttggaatgtattgttgattaaaaataataataaagattttgaaattatcttttcttttaaatgaaaacaaaggatttgctagggtatttctggtttcataataggtcaccaggaaacatgtttacatcaggcagtcataggttttaggcatgtaacacttctgtggagtttgtattctttgggaactggacctgcaggtattctggggaacccaggccatttgttccatttgaaaatagctaaagcatgaagaaaaggcaaattcttagaattttaaagggttttctctcaagtagttttaaaatttcaaatgatggtgttgtatcccttcccttcagacctggaatcacattttcccctcaagacagaaagggctctgcggcaggttgtgcctgggaaggggctgcttctcatttgtggccacctctctgcccaggagctggtgaggaagggtgaactaggggatgcctttcagaacaaaggaggtgaggagatgagcccctccacatctgccccaaatagagaccggcgtactagactgagcactcacagagacgttcacgaagggactgtttgcggttgtgtgagattggaggcaggcctacagcagggcttctcatcgttggcactgtggacattaattggggtggtagggctatcgtgaacactgtagaatgttgagtagcatctctagcccctacctactaaatgccagtagcaccaccaactctgactctgacaaccaaaaatgtctccagacacgggcagatgtaccctaggagcagtgtgccctctggctgagaaccatgggtgaagggaagcagtcatgatgttgaggcacctacagacaagaacagtaggaagcccttcccacccctctggctgaaagggagaccccaggaatagtggaagtcagggaggaggagctgcccagcaggtgccctagccatgagggatgcagccactgctagaatcttcgcaactttctggggagggtgcaagaaagaaataccgccaactcctctcacttctaccctccagtataccagtgctcccttcacattaggagaagtcagctagaagcccggtggcaaggacacctgggtaaggcagtctattgaaatcagcatcttggggcactgggcagggtggaggaggggcacagaatggaaaacggaaaataatcattctgttcatccatccatccatccatgtattcagtacttatgagcagcttagcaaagtggtcaagaatgtaggtgctgggccgggcacagtggctcacacctgtagtcccggcactttgggaggccaaggtaggtggatcacttgagctcatgagttcaagatcagcctgggcaatatggtgaaaccctgtctctaccaaaaatacaaaaattaaccaagcatgatggtgtgcctatagtcttagctacttgggaggctaagatgggaagatggcttgacctgggagatggaggttgtagtgagctgagaccacaccactgcactccagcctgggtggcagagccagaccttgtctgcacagaaaaaaaaaagaaaaaagaatataggtgctggagtgctggagtcagataagcctggatttgtatctggccctaccacttgcaacctgtatcctgtatgatcttgaacaagttgtttatctaaatgtcagtcaccttgagtataaaatggcaacaataattctatctacctagaccttattcttgcaatcttggatttttccccaatgggaaaatgcaagtcacaagtaaattgcatagtataagaccacagtcaagtgctaagcgggtggtatctgggcagtacccagtgttggttttatagacagtcctgggaaaggaaagacacagggttcagccatgaagtgcccccctcagcatctgtgaacaccttgagcactgtgcagatacagtggagaaaaagtccccagtgggctgagaaacaccacaggatctgcgttgcgtcctgagggacaggccggcaggctaagtgaaaaggaggaagaagggaccccagagcagggaatggtgagtgaatcaaagccaagagagttggagggagggggaaggcccagatagcagtgtggggagaccactgagatgaggtttggttgagggactcagtgttctctcctgtaaaagtaaggggagggcctggggccagctgccttcttcagtaccatttcacaggggtcaccaactcacatgtccacagagaccactcaagtgagcacgcacgtgaaaggcgcgcgatgggaggcagtagggcggtcccaggctggaagcatccgccttctgtaggcgtggccaccgctctgctccagcagctgctgccgtcttctaatgcaggcctagagacaccacagtctgattttcctaattttcaaaagatgctagaaatttggatctttatgagaattgccctgatttttttttaaatccatgtgagctgtactaaatagtccctttgcacccctgtccagacactgctggtaagtccagacaggggtgcaaagggactgtttagtacagtttagctgacacaactcagcttagaacccaagttgtgtgtgtttggattctgcctccgcatatactttcttttaaatagtaggctctaagacttaaaacaaaaaggatgccaggcaaagtggctcacaccagtaatcctagcaccttgggaggcctaggtgtgtggatcacttgagcccaggagtttaagaccaacctgggccacgtggcaaaacccgtctctacaaaaaatacaaaaattaggggggacatggtagtttgtgcctgtagtctcagccaccagggaggctgaggtgggaggaccacttgagcctgggaggtcgctgcagtgagctgtgattgtgccactttgccctagcctgggcgacagagtgagaccctgtctcaaaaaaataaacataaaaaaaaggaagaggggtccacctgggcccggtgaagtctgaattccccccagacttaatatcatggccaggtagggatttgggggaagggatggctgtggacaagggcacagacagggacgagggcagagagagggtgggccatagtcctggtgctgcacccggccctggcacttggcccagtgcatgctgggactagggctgcccttgagagctctggccagcacatttggttcttctttgatgaaattttttaaattttcagataaaggacagagactgttaaccacaaacacctatgttccccgacccagacttcctactgggttctttgcagctggggagatgatccccttccattccttaggacactgaccttcctctgggccatttgtctccagtaggggtcagctgggagcttttaattggtggtaaaggttgaaatgatggcatttgatagcatggccatgaatgtactcacagagtgccccacctggaatcccagctctgagcctgggctctgatggccctggtgggtggagagccctggctagtctcggagtagagggtaaggggaggtaggggactgagaggcttctggcagccccaggaaatgttgactggcagagtcagctgaaccgagcttgtttttcatgactaatttaaagttcaggctcttcccctgctaaggggaagtgaagacgaccatggagaagactagaaataatgaggttatctggaaacggcctcatgaaacctgaatgtatttttgctcagaaaaaaagaaagtgcagtaacactcactccgtcagacgctgcctttgctgcccaggccaccccagcctgcctggcctcgcctccagtcctccctttagtgggcagcttgtctccctgcggcccaagcttgggctcctcactgcctctcggttgtgtgtgtcctctcacccaccctgcttagcctgtctgtgaagccacctcctccttccacatttgtttttcctttctgtcttttgattacccctactcatgatataatttgtctgtgtcacacaccgtcttcgactgtttcgtcacacttcgtgtgggtcagcttgcctctggcaactcttctctctcttagagtggttttctgggtggttttcctcatgtttcacacagcgtcctccacacacaggtgatcaataaatacttgtgggtagataaaatatcagattgatgggtgaatgggtgagtgggtggatgggtggtgagttggttggatggcagggccacccaacaccttggccagtcccctaaagctgagggatttttcagatgcctgaaggaggattctccagagctaggggcagggagaattcaacccattgccatttgcacagcatttactatgctgattgccctctcttgagaaggactagaaggcagacttgaccaatggccttagtctagaagtcatctcccccataatactttaaaatcagaccatgggctttttaatccgtggtctgaaatagttttcaaggttggcacctggaagacatccactttgacatctttctttcattcagtagttgaaagcaacctcaaagtctgtgacttacctgtctacctgcctagaaattaataatcacttcccctagtggggggaatcagaggctgagatttgtagtggaggcaacacactgtgtgaggcctgggtcttcacctccagccctgttggggggcgggggatgggggtggaggcgctcatcgtggaggcagagaagaagcaccagggagtatcagcacataacagggtttctgatagctaggcatctgccttggatggggagccctgatgtggctggggcagtagcaagatgaaggctatactgcagcagccctgaaggctctggtttgcttccctcctctgcagtcccagtgagttatcccttcacaaggatggaaggcaccagattaaccaattctaaatgctgatccatcacatttccaacatgattccaaatgaccacatgttaatcccacttgtgtaggcctaccacagacatgaatgtgtaccagctaaccccacccatttgaagcactccaggaagattctagggcatatttcttcttgccctagcagtgtagccggtgggaggaagagcctcggagatcatttattccccacattgacgtcttcctcccaccaacccccagctcccacagctcttggcatgtgaaccactccactgagcacctgatgtccctgctgttgcctgggtgtttgtcttaccttcccacctagacctcctgcttcttcattcccttttgtggctgattactattccattgtatgaatttataacagcattttatttatccatttattagctgatggacatttgggttatttccacatcttggctcttatgaacaaggctgctatgaacatttatgtacaagtttttgtgtggatgtgtcttttttctctctcttagatacactcctaggagtgcagtttttgggtcataggtttaatcttttgaggagaactgcaagactgttttccaaagtggctacaccattttacactcccactaaaaatgtatgagggttccaatttctccacatctttgccaaaacttaacttttttttattatagtcatcccagtgggtgtgaagtggaatgtgactggggttttgatttgcattttcctgatgattaatgatgctaagcatcttttcatgtgtttattaagagtattaagagttctttatgtagtttagatacagtcccttgtcagagacaggatttgttcatattttctccctttctgtgaattatcctttcactttctttttgatgttactttgaagcacaaaagttttccattttgacaaagcccagtcttccttctctcccttctttccttcctccctcccttccttctttccttccttttttttttttttttttttttttttttttttttgagatggaatcttgctctgtcatccaggctggagtgcagtggcacgatcttggctcactgcaacctccacctcctgggttcaagcaactctcctgcctcagcctcccaagtagctgggactacaggtgtccaccaccacgcctggctaatttttgtatttttagtagagacagggtttcaccctattgggtcaggctggtctcgaactcctgacctcaggtgatccacccacctcagcctcccaaagtgctgggattacaggcatgagccacagcacccagtctgacaaagcccagtttctctagtgttgcttgtgtttttgatgtcatatctaagaagtagttgcctaattcaaggtcatacagatttacttctatgttttcttctgtgagttttctaaggccaagcgtggtggctcaaggccgggcgtggtggctcacgcctgtaatcccagcactttgggaggccgaggcgggtggatcacgaggtcaggagttcaagaccagcctggccaagatggtgaaaccccgtctctactaaaaatataaaaagtttagccaggcacagcggcaggcacctgtaatcccagctactcagggaggctgaggcaggagaattgcttgaacctgggcagcagaggttgcagtgagctgagattgcgccactgcactccagcctgggtgacagacagactccatctcagaaaaaaaaaaaaaaaaaaatcaaatgagttttctagtttttgctcttacatttaggtgttcggtacattttaatttttgtatattgtgtgaggtaggggtccaacgtcattctttcgcaggtgtgtatccagttgtcccaggattactggttgaaaagaccgttttttccccattattttggtacccttgtcaaaaatcatttgaccataaatgtgagggtgtgtttctggactctcagtctgttgatttgtgtaatctgcccttgctgttctgttgatctatatgtctatccttatgccagtaccacgctgtctttattccctggtttttttttttttttttttgagacagagtcttgctccatcacccaggctggtgtgcagtggcgcgatctcggctcactgcaagctccgcctcccgggttcacgccattctcctgcctcagcctcccgagtagctgggactacaggcgcccaccaccatgcctggctaatttttttttttttttttgtatttttagtagagacggggtttcactatgttagccaggatggtctcgatatcctgacctcatgatccacccgcctcggccttccaaagtgctgggattacaggcgtgagccaccgtgcccggcccacgctgtctttattcctatagctttgtagtaagttttgaaatcaggaagtgtgagtcctccaattttgttttctttttcaagattgttttggatacacagcagattctttattttttgtagcaacacggtcttgtctcaagtgatccttccaccttagcctcccaaaattaggggattacaggtgtgagccactgagcccagcctctcagcagattcttaaaacacacttgttgcttggctgcttgctttcttgtttccttgatggactggccagcctgtaagagcctagctggcctgcatgcttaagtgacaaattcctctccctactccagcctcccttcataaggcatttggccagtagagatctaggcagttctggctgagctgtcttagtccagggcaaggtagtaagagaccgaatttggcaggttgcagctggtccctcaagcaggagatctaaatccaactcatccttccccccgcatccccaaaacatctcagcattccttcctcttctgtccttgccttgcaggcttggagtctgggtagttaagagttctatctagacccacttctggccacatcacaccagctcttcccttttgcctgtcatcccgccactctcctgccccttcctaaccatgattcatggcaaaatggtgcaagatgggccaggcgtggtggctcacgcctgtaatcccagcactttgggaggccgaggcaggtggatcacaaggtcaggagatcgagaccatcatggctaacacggtgaaaccccgtctctattaaaaattcaaaaaaaatttagccgggcgtggtggcgggtgcctgtaatcccagctactcgggaggctgaggcaggagaatggcatgaacccgggagacggagcttgcagtgagccgagatcccgccactgcactccagcctgggcgacagagcgagactctgtctcaaaaaaaaaaaatggtgcaggatagaggctacctgtcctgtcaggtggggctagtgcagcagcctagccttccttggtggcatctctggtcacccccataggttctttatggactcaacaggaatgtcacttgagctgcagatactgattttgctgatggatgatgaaatttttttcttccctgttgggctttcagtccttgccttaaggagaccataaaaaaagtggtgggaggccaggtacagtggctcatgggtgtaatcccagcactttgggaagccgagggggcagatcacttgaggtcaggagttcgagatcagcctgactaacatggagaaaccccgtctctactaaaaatacaaaattagccgggtgtggtggcgcatgcctgtaatcccagctacttgggaggctgaggcaggagaatctcttaaacctgggaagcggaggtcgcggtgagccgagatggtgccactgcactccagcctgggcaacaagagcgaaactctgtctcaagacaaaacaacaacaacaaaaaagtgataagctgggcacagtggttcatgcctgtaatcccagcgcattggaaggctgaggcgggtgaatcacttgaggtcaggagttcaagactagcctggccaacatggtgaaaccccatctctactaaaaatacaaaaattagccagccatggtggcaggagcctgtaatcccagttactcaggaggccgaggcaggagaatcgcttgaacccgggaggtggaggttgcagtgagctgagatcacgccactgcacacaagcctgggcaatacagcaagactcagtctgagaaaaaaaaaaagagtgataaacccactgggtgcagcggctcatacctgtaatcccagcactttggaaggctgaggtgggtagatcacttgaggtcaggagtttgagaccagccgggccaacatggtgaaacccagtctctacaaaaaatacaaaaattagctgggcaaaaacaaaattatctgggtgtggtggcacatgcctatagtcccagctacttgggggctaaggcaggagaattgcttgaacccaggaggcggaggttgcagtgagccaagatcacgccactgtactccagcctgggcaacagactctgtctcaatcaatcaataaaagttgaagggaaaaaagaaagaaaaaggccacttaattatcccttctctatacagattctcagccaattgagaactgcagaaaggagttaggtagaggtaaaaatggagattgtattgtaggtagaggcccagtcaacacatggctcagacccacagccaaaatgcaccttcaccccctccccttttctgtttcctggtttaaatctgggttctaggctgcagagcaagcagcatggggaacggggacactaaagggcaagtgtcctgggggacttatctggagctctcaagatggtgagatcagtactttcacctgcttacatgcaactaggtgctgctgtgtgacctctgaatagtcctggccctactgcagggtcactacccctgctgaccccaccatcaaaacctctggattgttgatgctgggtctccaaatctgcgctttgcatgcaccatgaaacttgttgccaactgtaatttcttgatgtgtgcaagtgggttacataatacccaacccataggatgctagaaggactggggagacagcatttgatcagggcctggcactcactaggccctcagtggggccatcccagtaagcctggttcaacacccacgggaactaagcctgctgttgcagattctcggtcgtctgcctgtgtgccgagtaagtctttcgggggccagatggtcagggtaagtctgtgtgctcaagttagagatgtggatttgggagtgatcagggctcaatagaaatgcatcattgaaagacaggcctttcaatgtcagttggtgcaagatgggcctacagaggtccattgtgcagtgggctttcagtcccgtgtttcagacaccctccaggtttgggatgggaggggcagagttgttaggggaagtgacaacacccctgagcctccctccaaacccatatttaggattgtctaaggccaaatgttgaaataagcaatggtttccccaaggccccctgcttcctctttctgcacccttctattctttcagtgcccttcctccaagcacccaggaaaacaagggtccaaaaacaaaaaactccgagacagagggcagcaaaataggagccaaatgcagcctaccacctgctttttacagcccatgagctatcaatggtttttacatttttaattggttgggaaaaaataatattttgtgacacattaaattcaaatttcagtgtccataaataaagttttattggaacacagccacaaccatttgtttacagattgtccatggctgctttcagccgaggtgaggaggtataggcttgcaaagtctaaaatattgactctctggccctttaaggaaaagcttgccgatgccctgctctaggatgtgtcttgtgcccaagagatctgctttccaaggaaagggcaaaccagtcaaatccaggcagatgtgcagaggagacactggacagggaagccttcctgatccttctggtgacactggaggagcagaggggagataactctctaatcctgcagatggaactgcttctgtccacactgagttagggggcatggaaacagtgggttcaggcctatgactcattctaacagtataaatagcaggattcagaaggtgattaatcgtctccagtgagcccaccctaccagcttccctgccaggctggtggcagcgattttacctgaggcctttattgttcccagggtcctgcaggctgccctggggtcggccctgagcagtatattcattgctcacctttctcctgtctttgcagagtttgccttctgccaggtggatgcctccatcgctctggccctggccctggccgtcctgtgtgatctgctccagcagtgggaccagttggcccctggactgcccatcctgctgggatggctgttgggagagagtgatgacctcgtggcctgtgtggagagcatgcatcaggtgatcccggggtgtcaggggagtaggaggcagggttggagtgtcctaaacccgctagatgcagcacctacagcctcagctgggcttttgcatgcttagacacagagcaggaaccactaggaaagtcacccactgggtgctgccgaggacacggggacactcttaggctgacttctggggtgctgatggtcagcctccagcttagccaggggagagaactcggaaagaagcccctggccgggcacagcggctcatgcttgtaatcccagcactttgggaggccaaggcaggcggatcatgaggtcaggagatcgagaccatcctggctaacacggtgaaaccccgtctctactaaaaatacaaaaaattagccgggcatggtggtgggtgcctgtagtcccagctactcgggaggctgaggcaggagaatggcgtgaacctgggaggcggaggttgcagtgagccgagattgcaccactgcactccagcctgggcaacagagcaagactccatctcaaaaaaaaaagaaaagaaaagaaaagaaaaaaagaagcccctggatgcggagagttttattatggagactgcttgttagtcagtattggagttagcctggggcttcccaaagttaggtctgagggtgaagcattttcagagaattaggatctttgctgggaacttcctgcttgaagaaaactattattagccccctccagggtgggtgcagtcacagatagggaaactgaggacaaagacaagcagcaaaagcatcctgagaactgaaattgatcgccaccagcatctgactcagctggccttcttggcatccccagcaggccaagggttcaaaacgcattgtccctctttatgagaaatttggagacatggtaagtgtctgacaaaaggaccttgagaatcacagtgttatagaaacaggacacagcctagtgtcctgtgtttggagattccttcctctctggcctgctgcagagatgacctttcctccctcctctccaatttccagctgcaccttaaactctagagcccactcccttgttgaagtccccttttcagcatccatcccccaaagtatcttgactttgaaccacaaacacatctttatccaaggtcatgttaagtctggggaaaaaattcctctctggtggagaaatacagtgagtgaaaatagaaggtgaccttcaaggctgcaagtggtgtgtgtacatggatgttgacaggcaagagtgcaccctctgtcaggtgggggaagggaaacccctcttgcatctggcagggtactgcttggtctggactggggcttgtcaccattccctgtaagactgactttcggctttttcatctgatttaggtggaagaagactacctgtttgaaaaagcagaagtcaacttttgggccgagaccctgatctttgtgaaatacctctgcaagcacctcttctgtctcctctcaaagtccggctggcgtcccccaagccctgagatgctctgtcaccttcaaaggatggtgtcagagcagtgccacctcctgtctcagttcttcagagagcttccaccagctgctgagtttgtgaagacagtggagttcacaagactacgcattcaagaggaaaggactttggcttgcttgaggctgctggcctttttggaaggaaaggaaggggaagacaccctagttctcagtgtttgggactcttatgcagaatcgaggcagttaactcttccaagaacagaagcggcatgttgaagaaaatctgggggactgggatgggggtatgtgtggatttttcctccactaaatctgcaggaaacatgttgaacataaattcaaaaattttatcccattcatgcctcccctacttctgtgagtccagtcgtctgtcactccttacagagaaacttttcttcagttcactcattcagggcagcctattttattgctgctactgtaggaagtgaggcgactccgttgcagatttactctgtccccaggtgcaggccacctgcaggcctgaatgagcctttttcatcccccagggcctctaatgccctgccatagccgccctgcattctctgtgaaatgactacagagagttggattttagcacatacacatgatccctcccctctccccttttctggctttatgtaggggctggattagttggcaaacagcccatttggtcagatttgtgaattttgttccattttagcaaagcagaaatatgttccaaatgttggatcctgggagaattcaggatcaactttgcacaaataatttatttttattgtctgcatgtgttaagtcctgcagtgacctacacattccatcctaattattcaaagagccattgagcatttcccctaccccccaaaaagtatgctaatgctaggaaacctgattttgccacccagtgaaagtatatccgtcctcttagctgtgaggaggaacctggggaaaggagagtcagagaaaatgacttattctgtgcctacattgtttacctatcgcttggtggcagtaacaagtgtctcacttaaaatgccattaaacacatttatcagctgggcgcggtgtttcacacctgtaatcccagcatgttgggaggctgaggcgggtggatcacaaggtcaggagttcaagaccagcctggtcaagatggtgaaacccccgtctctacaaaaaatgcaaaaaaaattagctgggcgtggtggtgggcgcctgtaatcccagccactcgggaggctgaggcagagaattgcttgaacccgggaagcggaggttgcagtgagccgagatcgcaccactgcactccagcctgggcgacagagtgagactcgtctcaaacactcaaacacacacacacacacacactctcactctctctctctctctctcacatcctttgcagtgattttaatctagaaaccttaatgattttcttccttttcaagcccagcccagccctcttcctcacacatccagcaggtggcgctcttgcaaacgttttgctgctggtccagtttttcactggctcaccatttttcatttataatttcagaataagtgttacccactaatagttatcttgagaatcatagctttggaagggtagtagcttcatccgcattcatttttcatcctactgatctgaaaaaaacatttcatagtatgtaaatttgctccagattttagggtctgtaaaaaaaaaaaagtactcaggtaaatgatcacttagagtaatttcattgatgtttcacagagtctgaaggggcgggttagaggagagtgagtttacaatcatttcctactgcagaaaagctcatatttcaaatgtaattcatcgctcttcgagagaaaaccatctaacactaaaaatgcagctgtaagccaggcatgatggtgcacacttgtaatcccagctactcaggaggctgaggtgggaggatcgcccaggagttcatgcctgtgaaaggccactgcactccagcctgagtaacacagcaagaccccatcactaaaagaaaggaatttaagaacaaaaaagcagccatactggaagtataggaaaggggctttgtaggaagaggcaggaaagaagttaactcagtgtccaaagttttgtcctaaagagaacaggaaattccctgggtggttttgcaaccactcggccccaaatgtggtttttgtgatcctgaattaattacctagttaggaaactgtgtagcccacacctgatggaaagctgccaacctaacactttttgttctaagacctagctggtgagaagtgagggacttggtaaaataaatgtggtgataaccacagaaaaataataatgaaactggcccaacaaagcccagctcattggaaatggccagcacttctttttttctccatttaaaatgaaataaaagcagctacattagacattttatactagcaggtactctgtacacaagcatgtcccgtaacatgtccacatgttatctccagaatcctaatctgcaaagtgggtgttctcacagctgttgactgggactcaccccagatttggacgttgtttcaaacagatgtttccactggttctgtatctgaaatcttgttactaacctaataggagtgcctagggaagtggctgtttcacagtttggtgagatgtttggggtcatctcaccaaagaacaaaccagaccacagttgcccaggtatgtcaaggggtcagtgtagggtaggtgctaaaagtgaaactggtccctctgaggtcacctgctcttggctgtgagtcctagggtccaggacttgggtgcccccacagctctgcactcatgattctgtggctctctgtccatctggccacagttcagaagccaggctttctccacccttacgcttttgtcaatttggtttaatacataaagatggtttagttcttgcttgtcttttaaacaccttcacagatatcatttgcaccttgccaaaggtgagagatgaataaagcaagaatattatcttcgtttaacaaggaaacccaagtaccaaagagatgatgtgatttgcctaagaccacatgatttctctggggcaggacctgaactccagcccagcattcctgatccttaccctggactctggctccctgggccatgaggggagtacagtagtgggaaatgcaggatacactccagggactcgaatccctgagtggcaggcctagttctttccccagcgggtccggggccttcgagcttcaggcccaagctttttgtggcaacctgtatgaacgcggagggagaagtgccctagaccagactccagatcgttcctagtggggctgtcagcggctttagcctcactgggcgctagatgggagtgtcccctccgtacccggacgaaggcggggcgcccgctggcaaagcgcattttccagcgcaagctgttggggtgcggggctggcgagtgagggaaaacagagggtggcgcgcccaccatcagcgtctgtgcagccccacctgcgccgcgggttggtctcagccggatcctgcagccctcatcgagcaaaggctgggcgcggcgcccccactgccggggagggaagaggctgggaggacgcaacaggcccaggctgtgccgggcggggagcctcggcaggcagctgcacccccagccccagagggctggggaaggccggcccgaccagcagacggaaaggtggcgctaagtcgccttcaagcccgcacggctctcccggcctttcctcctgtcctcagagtcagctcccccgcccgggacgtcccgcgccactccgcgcctttggccctggctcaaggtcttgtgatgtgattagcaaagccagcgccttgtcctcagacactcagccctgcccggcaggccccggcgctcaagccctgtttactgagcctgggcggggagggggcggagaaacgagcccgggctccaccggcaagactgccgcggcggccgcccgcgtggccacccccacccccaccgcgactccacgtgcagtcgggctggagccgccaccgactggacgcaggccccgagcccccgcctcctggccggggcaccctttgcaaacccgccgggccgcggggatggttgcgatattctggcattttgcaattcccgcgcccagtacaaaaccgaaggtgggagcttaaagctccacaggtccgcctcggagaacagggcagggaaagacacgtccagggctgcagaatcccggccacgctaaacgtaccggggctctccgaccgcgcagccccggaggagaacagccgtgccttcccgccgccacccggcggcatccactggggccgagagctacacgccacaccggccgcccgggccgccggccccgcccggaggcctgcagcaccctcccccggaggtaaaaaaattggcggcggccaatgggaggccgggaaggcgcctgacgtccgcgagcgggcgggcggcgttgcctggagaccccggcgggggccgagttctgtcccctcccccggcgcgcccgccccgccgcagccgcactcccgggctctatatagggcgcgcgctcggaggccgccgagttccagcagtccgcgagctgccgtcggctccgcggggggggcgggccgggcaccccggggcgcggaggagcgctcctcgcttctctccttcccccctgccgcactccgccggaccctcccgccggcccgcgccgctgcactcgccctctcctctcgccccccggcaaactttcggcccctccccgcccctcgcccgttattcgtcgtggctcaagcccggccacgccgccccaagggctcctcccgacctcccggcctgccgctccggccactgcgggatccagaaacatgtcgaccacacttctgtccgccttctacgatgtcgacttcttgtgcaaggtaggccagggagcgggcccggccggcagcagccgttgtagttcttggactttgcctctgtccccaggttctgggggacgcccctcccgccctgcctttcaggtcgggaaagtcccggggtttgcaaaagagtgtccgagcgccctggaggcggggagggcggcaaggagggcgccggtgtcgcggttgagtttctccactgccgaccgcggccacgctgcccggggcttcccggacaggcttcgcgccgcccacctcggcagccggggcggaggatcacgtgtcgaaacccagcgcggcccacggtgggcgtcctctcctctcccgctccgtccagcaagatcttgctggttttgcgcgtgtataggtggagggtggaggccgagtcgggatccgccaagagtgggggaaaaaaaggaaaagaatcaggctgggagttcctctgcggctcgccccgagtctgtcttccccttccgtttttcatcccttccccgctcccctccctttggcagacagagaaatccctggccaacctcaacctgaacaacatgctggacaagaaggcggtggggacgcctgtggccgccgcccccagctcgggcttcgcgccgggattcctccgacggcactcggccagcaacctgcatgcactcgcccaccccgcgcccagccccggcagctgctcgcccaagttcccgggcgccgctaacggcagcagctgcggcagcgcggcggccggcggtccgacctcctacggcacccttaaggagccgtcggggggcggcggcacagccctgctcaacaaggagaacaaattccgggaccgctcgtttagcgagaacggcgatcgcagccagcacctcctgcacctgcagcagcagcagaaggggggcggcggctcccagatcaactccacgcgctacaagaccgagctgtgccggcccttcgaggagagcggcacgtgcaagtacggcgaaaagtgccagttcgcgcatggcttccacgagctgcgcagcctgactcgccatccgaagtacaagaccgagctgtgccgcacctttcataccatcggcttctgcccctatgggccgcgctgccacttcatccacaacgcggacgagcggcggcccgcgccgtcggggggcgcctccggggacctgcgtgcctttggcacgcgcgatgcgttgcacctgggcttcccgcgggagccgcggcccaagttgcaccacagcctcagcttctcgggcttcccgtcgggccaccatcagcccccgggcggcctcgagtcgccgctgctgctcgacagccccacgtcgcgcacgccgccgccgccctcctgctcttcggcctcgtcctgctcctcctccgcctcctcctgttcctcggcctccgcggcctccacgccctcgggcgccccgacatgctgcgcctccgcgccggccgcggctgcggccgctctgctgtacggcaccgggggcgccgaggacctgctggcgccgggggccccgtgcgcggcctgctcgtcggcctcgtgcgccaacaacgccttcgccttcggtccggagctcagcagcctcatcacgccgctcgccatccagacccacaactttgccgccgtggccgccgccgcctactaccgcagtcagcagcagcagcagcagcagggcctggcgccccccgcgcagccgccggcgccgcccagcgcgaccctccccgccggggccgccgcacctccctcgccgcccttcagcttccagctgccgcgccgcctgtccgactcgcccgtgttcgacgcgccccccagccccccggactcgctgtcggaccgcgacagctacctaagcggctccctgagctccggcagcctcagcggctctgagtctcccagcctcgaccctggccgccgcctgccaatcttcagccgcctctccatctccgacgactgaggcaagagggcgccagtgaggaggaagggaaggcggttcagagatgttggaggacacccctcgccatctcgcccttgctgggggcacgggagtggggggggtgacatgggccctaggcagactgcaagcccgaccgagcacttggactcgaactctgtgccgggaggggcccccacccctcctttttcggtttcctcttgtctttttttttttatttttattacgaagtttcattctttttgagcaaaaaagtcgaactttttctgttgaacaaaatattcacaacagggcagttgtgatacgaatagaacaaaaaaaaaaaaaaaacacttaaactttgttaggactccgatgagtttgggacttcaggaaaaatcaacccagcaccagcagctaccaaccaccattccatctcttcacttgaacagcattagttaagtccagatgtgggaacccttctcttggaagaagttcctaattgtgtctcagaccggtgtaaacaaaccagccagccgccaccttgctaaacctataagctttttaaaatccaatatattctgccaagaatatgccttgatagttagccctcagcccataggtgttttttgttttttaacagaattatatatgtctgggggtgaaaaaacccttgcattccaaaggtccatactggttacttggtttcattgccaccacttagtggatgttcagtttagaaccattttgtctgctccctctggaagccttgcgcagagcttactttgtaattgttggagaataactgctgaatttttagctgttttgagttgattcgcaccactgcaccacaactcaatatgaaaactatttaacttatttattatcttgtgaaaagtatacaatgaaaattttgttcatactgtatttatcaagtatgatgaaaagcaatagatatatattcttttattatgttaaattatgattgccattattaatcggcaaaatgtggagtgtatgttcttttcacagtaatatatgccttttgtaacttcacttggttattttattgtaaatgagtacaaaattcttaatttaagagattgtatgtaatatttatttcattaatttctttccttgtttacgtaaattttgaaagattgcatgatttcttgacagaaatcgatcttgatgctgtggaagtagtttgaggaacatcctatgagttttcttagaatgtataaaggttgtagcccatccaacttcaaagaaaaaaatgaccacatactttgcaatcaggctgaaatgtggcatgcttttctaattccaactttataaactagcaaaaaagtgtttgcttattccaccagttctactgtgacatactcgagtataaagacatgtagcaataacggggagtggggggggagtctcacagtgcctttggaagggcccgaacttgccttaaatcttcctcaaccaaataagtattttattagtgcttgagagaatctgaatgtaggatgggttcaactgcacaaaaggaaaagatttttaccactttttttatatagatataaagtgaagcaaccgccttagtgctgaaatatgtagtacatgaatatgccttgtttaattacagaaaattccaaaacttgtactatttttttttccatgtagaaaggcaggaatgtctcctaagctttcctggacagcagatgaatgagcggtagctttagtttgtacgtaggtacagttggagcactatatgtactctctggactactttggacagaagtaggtttttgaatgtaacaagataagtcaacttgagttgtaatatattttggggaatcagctcactacaaattgtgactgtaaacattgtactgtaaatgttttgtagttttcccccaataaaatttttgggaaaaaaaggtattaacatgtaagagctttctttttaaacaggaatgtcttagctttctagcttcccagctaaccatgtctgccattccccaggtcttggcatggtgggggaggacttggagagctggcagagccagagttcagaagagcctgcgtcctctcagcccgtatatattttataagcaagttcttctaatgaaagaaagtaattatttggactgtcaagggcattagttagctagttgttccctttggtaataagatgcatcccagagttagctggctgggagcagagcctggccgggaggcctgaaggggtgtggcctgcctgtgagtcactgagtggatcatgtggctgcggtagcagctgagggtccgattttttgctgggaaacacaactgcttgggtggggaaggggaggaggatctttctgcagccggtggcctgccaggcctgagtgctgagctggaggtggagagtgaggccaggctttttctgggtcggagaactggagttctgcctggattttggaaagcttggtatgtccttgtggacagggtggaggggaagattaaagaggttaaacttatatctgggtgatgtttgcttatgcggacaacttcctctgggaatgaacacatacaagttatttatgcaaaaaagatttcttgtctgtgctttagaggactgtaagtgaccagaaagcaaattcaacccaggtctctagaaaaaggaaggaaaaaaagacattgatttgcctgctgatttcgcaaacggttgaacaaaatcttactatagtgactctggctgtttctaactttaaaacaatcactttaggaacttaaatcgggttcataaatcaattcatgtttcttctcctccaccgccgtcccccatgcacacagttcagacactttttccaaggtaggtaagagatttagcaatagtttgctttctcatatacaacagctgggctccatcaacaatcctcgcatccccgctccctcccgggccctgccttagccggggtctctggtgactcacagctgagcatggaggggagggggcggtctggtggatacgccaggcctcgggcagctgtttcacgttaacgatgattgcactggtgttaactggagcgttttggtgcttgttgcttgctgccaaaggggatgggaaacagtttcaaggttctcccagatgccagcccctgactgaaggcctcagcagcaggggagaggaagcccgaggccaaggagggctcaggaggggtgaagactgcaggctccctggcccctacaccataaagaatgtgcagtggggaggaaaagtctaaaatgtgctatttaggttaagctgcatttcaaaggccttgtttccacttcattcctaaacttatttttctaaacaagtacttttgatcagctggaatgttgggggtaagccacattcatttttaaaaactggtttgtttgaaaagcccaactgttaggatctgaagttttgtatcgcagacccagtggagcgtggaaagctacggggggatcattcagaaatttc

SEQ ID NO: 243 - DNA, 3765 bp, Homo sapiens
atgtcatccatttgtaacagtctttttgaagcattgtttcctggatcttcctactcgactagattttcagctttaaccattttaggttcaatagctgaagtttttcatgtcccagaaggcagaatttatacagtatatcagctgagtcatgatattgatgttggtcgtttccaaacactaatggaatgttttaccagcacttttgaagacgtgaaaattttagcatttgatcttctgatgaagttatcaaaaacagctgtacattttcaggattcggggaaactgcaaggcttatttcaggcagcattggagctcagcacaagcaccaaaccatacgactgtgtgacagcttcctacctgctgaacttcttaatctggcaggatgctctaccgtcatccttgtctgcctacttaactcagcaagttgcatgtgataatggagataggcctgctgctgtggtggaaaggaacacattaatggttatcaaatgcttgatggaaaatcttgaggaagaagtatctcaggctgaaaattctctgcttcaggcagcagcagcatttccaatgtatgggcgagtccactgtataacaggagctttgcagaagttatctctaaacagcctgcagttggtgagcgagtggagacctgtggtagagaagctccttttgatgtcctacaggctttccactgtggtgtctccagtcattcagagctcatcccctgaaggcctcatcccaatggacactgattcagagtcagcaagccgcttacagatgattctgaatgagattcagcctcgagatactaatgattattttaaccaagccaaaatattgaaagaacatgatagctttgatatgaaggacttgaatgctagtgtggtgaatattgatacttctacagaaatcaaaggtaaagaagtaaaaacatgtgatgtaactgcgcagatggtgctggtatgttgttggagaagtatgaaggaagttgctttacttttaggcatgttgtgccagcttctgcccatgcagcctgtgccagaatcttctgatggattattgacggtggagcaggtaaaagaaataggagattactttaaacaacaccttttgcagtccaggcacagaggagcatttgaattggcttatactggttttgtgaaactcactgaagtactaaacaggtgcccaaatgtgagtctgcaaaagctgccagaacagtggctatggagtgttttagaggaaattaaatgcagtgatccttcatctaaactctgtgctacaaggcgcagtgctggaattcctttctacatacaggcactgttggcatctgaaccaaagaaaggcagaatggatttgttgaaaataacaatgaaagagttaatctctttggctgggcctacagatgacatacagagtacagtcccccaggttcatgctttaaatatccttagagcattgttcagagatacgcgcctgggagaaaatattattccttatgttgctgatggagctaaggctgcaattctgggttttacatcaccggtctgggcagtgcgaaattcatccacacttctctttagtgccttgatcacaagaatttttggagttaaaagggcaaaggatgaacattccaaaacaaatagaatgacagggagagagtttttctctcgtttcccagaactctatccttttcttctcaaacagttggaaactgtagccaatacagtagacagtgatatgggagaaccaaatcgtcatccaagcatgtttctcttacttttggtgttggagagactctacgcttccccgatggatggtacttcttctgctctcagcatgggaccttttgttcccttcattatgaggtgtggtcactcacctgtctaccactcccgtgaaatggcagctcgtgccttggtcccatttgttatgatagatcacattcctaataccattcgaactctgttgtccacactccccagctgcactgaccagtgtttccggcaaaaccacattcatgggacacttctccaggtttttcatttgttgcaagcctactcagactccaaacacggaacgaattcagacttccagcacgagctgactgacatcactgtttgtaccaaagccaaactctggctggccaagaggcaaaatccatgtttggtgaccagagctgtatatattgatattctcttcctattgacttgctgcctcaacagatctgcaaaggacaaccagccagttctggagagtcttggcttctgggaggaagtcagagggattatctcaggatcagagctgataacgggattcccttgggccttcaaggtgccaggcctgccccagtacctccagagcctcaccagactagccattgctgcagtgtgggccgcggcagccaagagtggagagcgggagacgaatgtccccatctctttctctcagctgttagaatctgccttccctgaagtgcgctcactaacactggaagccctcttggaaaagttcttagcagcagcctctggacttggagagaagggcgtgccacccttgctgtgcaacatgggagagaagttcttattgttggccatgaaggaaaatcacccagaatgcttctgcaagatactgaaaattctccactgcatggaccctggtgagtggcttccccagacggagcactgtgtccatctgaccccaaaggagttcttgatctggacgatggatattgcttccaatgaaagatctgaaattcagagtgtagctctgagacttgcttccaaagtcatttcccaccacatgcagacatgtgtggagaacagggaattgatagctgctgagctgaagcagtgggttcagctggtcatcttgtcatgtgaagaccatcttcctacagagtctaggctggccgtcgttgaagtcctcaccagtactacaccacttttcctcaccaacccccatcctattcttgagttgcaggatacacttgctctctggaagtgtgtccttacccttctgcagagtgaggagcaagctgttagagatgcagccacggaaaccgtgacaactgccatgtcacaagaaaatacctgccagtcaacagagtttgccttctgccaggtggatgcctccatcgctctggccctggccctggccgtcctgtgtgatctgctccagcagtgggaccagttggcccctggactgcccatcctgctgggatggctgttgggagagagtgatgacctcgtggcctgtgtggagagcatgcatcaggtggaagaagactacctgtttgaaaaagcagaagtcaacttttgggccgagaccctgatctttgtgaaatacctctgcaagcacctcttctgtctcctctcaaagtccggctggcgtcccccaagccctgagatgctctgtcaccttcaaaggatggtgtcagagcagtgccacctcctgtctcagttcttcagagagcttccaccagctgctgagtttgtgaagacagtggagttcacaagactacgcattcaagaggaaaggactttggcttgcttgaggctgctggcctttttggaaggaaaggaaggggaagacaccctagttctcagtgtttgggactcttatgcagaatcgaggcagttaactcttccaagaacagaagcggcatgttgaagaaaatctgggggactgggatgggggtatgtgtggatttttcctccactaaatctgcaggaaacatgttgaacataaattcaaaaattttatccc

SEQ ID NO: 244 - protein, 1208 aa, Homo sapiens
MSSICNSLFEALFPGSSYSTRFSALTILGSIAEVFHVPEGRIYTVYQLSHDIDVGRFQTLMECFTSTFEDVKILAFDLLMKLSKTAVHFQDSGKLQGLFQAALELSTSTKPYDCVTASYLLNFLIWQDALPSSLSAYLTQQVACDNGDRPAAVVERNTLMVIKCLMENLEEEVSQAENSLLQAAAAFPMYGRVHCITGALQKLSLNSLQLVSEWRPVVEKLLLMSYRLSTVVSPVIQSSSPEGLIPMDTDSESASRLQMILNEIQPRDTNDYFNQAKILKEHDSFDMKDLNASVVNIDTSTEIKGKEVKTCDVTAQMVLVCCWRSMKEVLLGMLCQLLPMQPVPESSDGLLTVEQVKEIGDYFKQHLLQSRHRGAFELAYTGFVKLTEVLNRCPNVSLQKLPEQWLWSVLEEIKCSDPSSKLCATRRSAGIPFYIQALLASEPKKGRMDLLKITMKELISLAGPTDDIQSTVPQVHALNILRALFRDTRLGENIIPYVADGAKAAILGFTSPVWAVRNSSTLLFSALITRIFGVKRAKDEHSKTNRMTGREFFSRFPELYPFLLKQLETVANTVDSDMGEPNRHPSMFLLLLVLERLYDMDGTSSALSMGPFVPFIMRCGHSPVYHSREMAARALVPFVMIDHIPNTIRTLLSTLPSCTDQCFRQNHIHGTLLQVFHLLQAYSDSKHGTNSDFQHELTDITVCTKAKLWLAKRQNPCLVTRAVYIDILFLLTCCLNRSAKDNQPVLESLGFWEEVRGIISGSELITGFPWAFKVPGLPQYLQSLTRLAIAAVWAAAAKSGERETNVPISFSQLLESAFPEVRSLTLEALLEKFLAAASGLGEKGVPPLLCNMGEKFLLLAMKENHPECFCKILKILHCMDPGEWLPQTEHCVHLTPKEFLIWTMDINERSEIQSVRLASKVISHHMQTCVENRELIAAELKQWVQLVILSCEDHLPTESRLAVVEVLTSTTPLFLTNPHPILQDTLALWKCVLTLLQSEEQAVRDAATETVTTAMSQENTCQSTEFAFCQVDASIALAVLCDLLQQWDQLAPGLPILLGWLLGESDDLVACVESMHQVEEDYLFEKAEVNFWAETLIFVKYLCKHLFCLLSKSGWRPPSPEMLCHLQRMVSEQCHLLSQFFRELPPAAEFVKTVEFTRLRIQEERTLACLRLLAFLEGKEGEDTLVLSVWDSYAESRQLTLPRTEAAC

SEQ ID NO: 245 - DNA, 24995 bp, Mus musculus
  misc_feature (1)...(24995): n = A,T,C or G
agacatgtgcgagtaagcagtgaggacgatactcagagcttcaaggagcatgcgccaaggtcagggatgtacggtaggtagtctctgcagattctttttaccctcactctcacgaatccaatgtgggaaaagcaggctccttgtgagctccggactggtcccagagtcagtgcacagtgctcagccgcagctccccgggagcaggggacggagagcacatgcgggaggatgaatctagatcatctgcggaagccaacgtgctcccatttcatttacttcaagactcttagccccaccttatgtgaatgtgaattgtaagttgtcgtggtaggcgattaatcccactcaaatggctgggacatttccaaacttccatgtggctgacactctcccctccaatacgcctgggctgtcctctaatcccaagcaagtaagtggagacagttggccacttactaaaatctatattccaatctttgcaatgggggcaggggctggggccgctcttgccggctcttccatgattgctgtgctctccctcctgcagcctcgggcctggtctctctcctttcccgacacagcggttctcagtcccctctctgtccctttgccctcaaatcctaaagtcccatgtctgtctccctgcccagccattggccgctggccattttattcaccaatgaaaaccaaacgagggcaggaatcctcagggttttagatgcaggtcctcctgcaattttgggaacccatttaacataatacaagcattaaaccaaatccaccacagcaagtatccagcattatgtagcacagtggagggaactcctaaaactcgtacgatcagagacacttgagcttcaggctgcagacctcagattggcctcctgagacgatccccctgggaaaaggtacctcagggttgctatctgaaagcaaagccaaggttaaactcctgtcgacacaggtcaacccctgcactcatgcccctcttggaaatgtgagcctttgtgtatctgtttgagacaggctcttgagtagccaggctggttccaaccaaagtcactggacagatcagcctttgcccgcccctttcaagcagtggaattctaggcttgccctgccatgcttggctaacacaagccgcttgatccctccagcaagcaaaggcatgtaaaaccagcccgaggacactccgttcagagctgtctggggcttgtcgtttaagctggtggacaattgtcttgggacacaagcatccatctgggaaggcgtcctctaaccccaagcatcatctccccacccacccccttccaactctacctctacagctaaatgccagcgtttggctcaggaagcctcagttcagtgtaaagacaaatatacatggtgagtgttgtgcccgcgttgttatcggccggttctgtgtctgtgtgtttcagttaacactggatctccttctgggttacaactctagccagcaccttggatttcctagcaaggacgtcagagctggatgtgagttgggcaatctaaaggacaggacagggccagagcttgcggagaagaaacacaggctgagcgctttcactattgccaaactcaggttccagggggtcttagaaaaatccaaacaggcatgggatgacagcgccttaccattccatctttctgtctggttagcttctggagatgctgatccatccagggccctctaagctacctgcagcactgaagggcacaggtgggccttggactacattcagtctaatatcaccccccacacacacaaccccaccacaccaactctgggaacccagcacacttgctaccccaattcaagccccgtgtgcctgtgcttctcccgtgttatccttaagccccatatccccttgtcctgactcctttctatttttccttcacttcagtccccagctcttacccctccaagtcctcgtagggccacacacactctactcacaacccaaagtgaggccaggcacatacagccacggctcagcatgcctcctggaaggtcgtgtgggcaatgtggtgatacccgtgggccttcatggttgttcctaacttgtcatatgtgagccggacggcagttgtcttcgctttgagaacgagctttcatggttccatgtgctgacctagacagaggacctcaacatgtggctagaagacgcctccatggccatactccacacgccatattcctggggcagccactgactgcttcccactggtggccctcatgtcaatgcccttcaatccacttcggcctgttggtccagcccccaggtgctcccagtggcagcctctgtgtctcctcctcacagacctccacaaacccacaggcttggattgccatcagaagttctctggagctgaaacccttccccgagggtctgtgggttcagggagtggcccgatcattctgcagaaagacaagaatccctggaaaatctgagccaccgctcaacaagggcaggccacgagagggcagaattggcccacatggccacagagaaggggaaacttagagaacaaagatggagtgttcttgacgggagcctgtgtagatgcacatgagagaaggagggcatccgataagatgtcgaggaagctttagagagacgttccctccattacttggtgactctaggtcagcaacagaaccaagaaagcccattcccaaaggccagtgaagagtgggcttacaactgcagtctggctcacgagtgacgagttagaaacaacaatgaaggccctcgggaaacaccacaggctctgccacattgcccacgtggttcccagggtgctcttggcctggctgatgggtggcagtgctgtactgtgcacagcctttcccgctgtgcttgacagttctgtcctctaatcctaagcaagtaagtggggcagttggccaccaagagttactgtgcgctcaagctggagggcatccagacccttctgcctgcaagtggtgagatccaggatgccagcctgacccaggcccaggatctttcttggaacatccctccttcagaagccccaacctggctaaaacacatgggggccttcactcgggtttctcaggggccccccataaatgagttctgctatcacagacccagtatataaaaagtaactggggtcatataagtatatgccggggtaaaacagtgttattaaattatggaaagttcctttaaacaagccagaccttaatcccagcactcaaagaagatgaggcaggggaatcatgcttgtgaatagcctgaatcatatagtgatacatacacgcacacacagatagatagataaatagatagatagatagatagatagatagatagatagatagatagagatagagactgagaagacaatactatcaataaaattgttgttaggcaagcataaggccctgagttcatatctccaccctcacaccagccccacacacatgtaaaaagtcacctaggtatcctgtgcccataatcacagtggtgggggaaataaggacagaagggtttctgtgtctgctaaccagctagacttactgaattggtaaactctaggttcagtgaaagtccctgtctcaaaaggaaagaaagaaagagggggagagggagggagggagagagagagagagaaagagagagagagaaaggacactctacattgacctttgatctctacacacacatgtgtacacacaaacaaacaaaagcaagtttctttaaacagcaaagttcacacaccagtccctgtcgcctggggtttttaaaacagaagtgaattgctaagatgggtttctgccatcttctgctcgctcacccacagtaagcccacagtgaggtgagaagctaaaggcagaacacggttaagaagtggcacctctggttctctctggggtgtccaggctttggggtgaccctttctttggtcggctgaccatgtcacattcactggtcagaagggagccagtattctagcagggtgcctggctaaacagtccctttagtggcctttgcaagagcatgactgtctaatgcagctagtgaaaagaaacaaccgttttatcagggaacagccagannnnnnnnnnnnnnnnnnnnagggctttgagagggcaggggtgtgctcagggagcaggaagaagtcatgacatgctcccccgcccccagtgctgtgatccttgcaatttctctgacaggatcataggtgtggaagggttttggtgtcttcttaaaggcaggcagggaggcaggccgtgttgaaagggaacttacctttcactgttcctcctgtaacctgaagctaacaactgaacctgtaacctgtaacctgtaacctgtaacctgtaacctgtaaccctgcgcagcttctcttgcccgatggcgtggctgtcctcagagggtgcagccgagccattgctggatgggagctttctagctctagcataccttcctttctgagcaaatgccaaacacctcgcccactccagagcttcagcagcaaccttgtggccagtccccagctgaaggttttcagcggtgccttcatgccgggttcatcatctcctaggcaacttcccagtgttgacattcccaaaaaaacagctaggcttgacccacttgaccttgaccttagtgagctttagaccatccagtgactctagtgctcctgggtgtgcatgtgtgtatgtgtgcgtgcatacatgggtgcgtgcatgtgtagtgagcatatgtgtgtgcattcatgtgtgtgtgtgtacatatgtgtatgtgaatatatggggagtgtgtgtgtatgtatggggagtgtgtgtgtgtatatatatatgcatgtgtgtgtgtaggtatggtgagcgtgtgtgtgtgtgtgtgtgtgtgtgtgtgtgtgtgtgatttgcattgaaaccagaggttaatgtccagtgtctttctcagtcactctccaccacactttttgagttgggaaatcttactaaacctggaatttatggccttcagctagactggctgaccagtgatatacagagatccaccactcccacctccccagtactagaattacagacatgcacccctagcttttacaggggtgctagggacccaaagcccggcctttatgcacattgccaccacagtgcccagccgtctccctatcctcacttttctaaatggttgtaaaggtttttttaatgtgtatgctagaggtcttcatgtatgtatgtgtactgagtgtctgcatgtatgtatgtgtactagactatctgcatgcatgtatgtgtattagattatctgcatgtatgtatgtgtactgagtgtctgcatgtatgtatgtgtactagactatctgcatgcatgtatgtgtattagattatctgcatgtgtgtatgtgtactgagtgtctgcatgtatgtgtactagactatctgcatgcatgtatgtgtattagattatctgcatgtgtgtatgtgtactgagtgtctgcatgtatgtatgtgtactgagtgtctgcatgcatgtatgtatgtatactagactatctgcatgtatgtatgtatactaaactatctgcatgtatgtatgtgtactgagtgtctgcatatatgtatgtgtactgaatgtctgcatgtatgcatgtatactagactatctgcatgtatgtatgtatactagcctatctgcatgtatgtatgtgtactagactatctgcatgtatgtatgcgtacctctggagctggagttgcagtggttttgagccttgtgagtgataagaaccaaacccaggtcctctgcaagaacaggaagtgctcttaatccctgagtcatctctccagccctggccctattcatttctcctattcctcaagcctgttactaatgcttctttgtattagaattcctccctttgctgttggaatcactgcgtgggttctgtctcctgattcttgtgctcacagccctcacacacaggcttccagggtgcctcagacagctcctcgcctccacctccatgtgtgtcttcctccacaaatccttagagcatctttagtcacttcctctcttgaatatccttgtattagcagggttggcttaagaaaacagaaaccgttccaagggtttcaagtcggaagagatttgacacagggacattcgtgctgaagtctcggcttcttcatagctgtgtagctgtggccaagtcactgggtcccttcctaacacagtttctacctctagagataatggtagtgcccaactcataggctgctgagagacctaagtgcaaatcaccatgagaaatctccagcatatagtttactgcccactaactgcaagctatcggtatggttaccattctaaccctctaaactgctccagcatggcagagcaaggtacctcaaagtcactgagtccatagctgaggtaaccgtgtgtgtgtgtgtgtgtctgcttcaacaaagagatgtcatctctgacggaagaacagactagatgaccttgaatggtgtgcaggtcccaaaggacaatgtgcttctaagatgacctgtccttcaggtctcgcatcgtcacctcctcacctgcaccgagcagatctctctcctctgagcacaccttgaaattttaattaaaatataatacatgcacatttttcaaaagtcagaacacaaatggcacagctagcaagaaaataagacctcctaccatccccaagtctggtccttcagctctttcaccccacagccatcatgaaacagttgctctgggggtttttccagacatgttctagacatgtgtgataaactcaatggattttcatatttcagtacacataggtagctgctttggcttttctgatttatcctcctttgagtacaagcaatttgtttaaacacagcttccttcttttctcacatgccactctttagagcactgctttgctttgttatgcctgagacagtatcttattacataggccaagatggtccttagctctcagtggttctgttacaacctccaaactgctgcaatggcgggcagtctgctgctccggcctctgcttagcagcattggtacggatgcaacaagggctatttaatcagctctgtctgattcttgctattacaaataaggttataaaaatcctttatgatgcaccaagcttttcctttttatgacgcagaaaacatctcatgtcttggagttattgcctccaaagaccacctttatggtcttatattgaaaaccagggctgcaaaatgaacccccccccccatgaattccaacccagggccaaatagccgcgctgtgctatccgcccagcttccccgcacggtaggcagtagtgatcgtacctgctttgcattgcctcaagggcatcctgggaattggatgttcttgaaagctcaagagttctgtcctaaaacatcaaattctgggccaatcctgcaattgacacacgctttctgctgtgtcctatgccttcagcatgctgcttgcccgaccccttcgaagagccactggcctgcctgtagctcccactgcttggcagctaaggctgccatgctcctcatgcccacccttcgggtctcacaccacagatgaaacaggaacagggctgggcacctctctaaggccacccagccaccacccttgaaatgaggcaaatcacaagtgaccaagggtccctgcgtgatgttgattcttttcacgtgtggctttactaagagggcccccctccttcttctgagctcaatggaagaggaagaggtgattcccatagtgctatgactctcaaaaaaaaaaaaaattccccagcgtatgggactcacttctccaactttggggcaattcataaaacacgggcggtgacagatgcatccagagagaagaaatgacgctctcagcgtcattaatgaattagtggttaactaatgcaactccacggatggccaccttcttgagcaagaacagacatgcagggatggaaatggatggttatccagcgggcattccccaccaccccccgccacctccccgagagtcatagcctgggtgcagaaacagggggtccctgtggcaatctgggtagccgactatccaaaccaaccaactcctggctcagtaagggaccttgcctccatagatcaggtgcagagtgatgtagaaagacacccacacacatgcatgtaaacacacacatcatactttacacgtacacatacacagaaaggaagttgtttacagattttaacttatgcaccatgtgtctgcaggtttgttggtgtccacgcaggccagaagagggcagcagatcctctggaactggagtttcaggaaggtatgggctgcccggcaagagtgctgggaactaagttcaggtcctctgcataagcagcaaactgtgagagcagtcttaacagggcaacctctccagctccaaaagggtagatttgaattctatttcacgccatagcaaagtcccagcaccatcatcttcatcatcatcatcaccaccaccaccatcatcaccatcaccaccaccaccattattacactaattgtggtggcaatcattccttagtcctgtatggaatacatcatttcctttgttagtactgcactgtagtgagttgtctttctcacttttcccatccataagtgaaggcacgaaacatcagattcatagaacaattctcttggtcacacagctgataataacaaccgagtccggactcaaatgtagcatgctctccttccacactgtgaccctgactccatctattgaaagggttttgttaagtgtgtttttataaacccaaagaagacaaagtctacttccggtctcccggcatcctctcctccactacacactcttcctgggatttgcaggtcaggtcatactccttccccagggagaggatttcttggatcgggtggctcaaccagctgatgctgacagtcggtgttcggaaggctaggcattaggatgaaagcagcagcagtcttttacaacgcggagacagaggctctgatccagcctgtagtcattcgctgtgcgctcaacatgacttgggccaaccctagggtgcttcgtcggctgaatggccgtaatttataggtctatttctgaaggtgtttttagaagacattaaccttgcaggaaacggagtaagaaaagcagactcccacccagtgtgagtgggcctcgtccaccgagatcttcagtaaaccaagatagaacggagaatgagactgtgggctttttcacctctataacctctcgagctgattcccacgtttctttcctgtcacctgtcactctgtttccccaggggaaccagcccaaggtttgtcgcgctgtgtcggcaccgtcttccctctggctcattgctgccctctgctaaagacactcgtcacattggattcagactgttgtcgtgacatcatttcaaggcggtcatttccatcaagatcccaccttcaaatacagctacattctgaggcattggggtaagactttaaggtcgggagaggaaacaaactcaccccaacataaactcactctatttaaaggagagcccaggagaatgggtttccacagttggattccggcaccattaggaggcgctctggtattcacgaagccctgtgggtaagagcccagccttcactgggggtaatttttttattacatatatttatttggaggtgtgtgctgtacacacacacaccacagcgtgcgtgtgggcaatcagttctctttttctaccgtgtaagcctcggggattaaattcgggttctcagacttgccgcaggtgtccacaccgctgaactatgttgctgcccctccaccttctgtcctcaccaagactcctcaaaggtgtcacagcctctcccaaaagtgccctggcaactggaatgtggccattatgaggatagggattgtgatggtggtcagaacctggtgaagccaaatggtattgtcttaaaagatgtcctgtggccctggtccgcagcacggtggttatctggatggcgatggaggacagggaggtgatggaagcccgaggggcaggagaaagctgccccacactctccaaggtggcccctgttgacagcatgcctgaaggcaagccaaaggcctctttggtaagaggacccctctcttgatttgccccatccatcccactgggggtcaggggtaaggggctctaagccttagagtctgctcacatgtgctagaagattcagttgacaagaagaacagtgtcccctatatccctataactggttcccagctgccaccggggaaccagaaaaactttacaggattgtaaaggttgagtgaaaactttgtctctgtctctcatttgaggcccttacttccctctgtggacaggacacacacacacacacacacacacacacacacacacacacacaaacaaacaaacatatacatatatatgtgttgcttggttctttcaacacctgggcttcttcctcactctggagctcctgaaagatctgttgtctgacagttaggtgaagggtgggggatgggaaaatgacctccagggtgataaagagtagacctgagcagacaccttcctgatccaccaatgcctcacaacttttgggcactcgcccttcatgggagttcaccttcccctgttatatacacttctagcaaacaccccgtctaggtagtctttgcaacacaccccaggctcctgaagctcggagcagagggtgtggttgtagggagccccacactgactcccccattatcaccccacttcttctccatcccaggatgcagaagtccccaaactagaactgcctaccctggaagagaacgggatctgtgaggacagagattgtccggggccccctaggtcattgcctccaaagtccggcccaaacgccaagggtcaggctggcgatggacctggactggagtccgtagagctgcccctgcccctggagacagaacaccgcaacgcgatggagctggagaaggtgcgcatggagtttgaactgacgctcctcaagtacctgcaccaggagaacgagcggcagaggcagcatgaggaggtgatggagcagctgcagcagcagcagcagcagcagcaggctttgcctcaccaggtagcagagtgggctctgggctgtggctgtactggcttggctatgcatcttgtctgctggtcccaggtctggctgagaggtggtgagcatcatgtagctgcctctacccactggtgcctggatcggtttgcaggatggcctgagaccactgcccctgtgattagcttccctgctatgttagattcaagcctctaaagagagttgagagtagaagatatcctgaaaccacatcctctacccagaatcccttttgatggtctcttcgtgtccaatactcatactatgacaggctttccgccactgtttttaaaaagttattttaagatttattatatataaatctgtgttctgcctgcatgtacacttgcatgccaggagagggcaccagattgtaggtggttgtgagccatcatgtggttgctgggaactgaactgacctctggaagatcagccaaccctcgtaaccttggagccatctctccctcccctttccagtacttttatttctaagatgttccagtcgttcctgtcgcctgactattgaatgataacagaaacctatcctttttttatccgttttctctgttggacacatgaccttacttattagaaccaaccaaagcaacattctctttacaagaaatagatgctcagcccctaccatgctacatggagacaagagtgctcatctgagggatggggtctagctcagtctgcagagtacttgagtagtatgcatgaagccctgggtttggtctccagcatcaactaaacataagtagaggcagaataatcagttcaaggtgacatggtaagtttgaggcaagactgggctatgtgagaccttgttttaaaagaaaaattggatggaatgccacctggggtacttaacactgtggccagactattctaaacaccctgtgatgaaagatgtcaccacttaaaagaagtgcctcctggtctctgaagtcataggttctgggtaaaaaaactcaggcgctaagattttgtttttaaaccacttaaccttgaacacattgctactccccctcgagctttggtctgctcatcactaaagtagaacctgtctcatgggtcactgtaaaggatgagagagggagtgcgtggacgctgctcttcagtggaccagcacatgagataagcgctcagtaatcgctagctattaccatttttatgaactcacgcagttcactgcttgacccgagtgcaacgacttccattcatcacttctcggtctccttgggatatgatgcatcagccccacttcccagctctgagtcagcctggattctgagaaggttgtcatgatctcagctacggctgtaactgttgagaagggtgtgacctaaagttaaatcccattgcagatctcactgcaggttatcagcggctccacccatcagtgccgcaccgatacattctctcctgctcacagttctgcagcatgcccaagaaacctgtcctgagccctgtgtcgggaggcttccaagaataaggaactgcactacctgaatcatttgtcttattgattggtcaattcttcaaagagaagataggttggtctgacaggacttgtcctccgtgaacacatgatggcttactaattattctttcataagaaaaaaattttttgtaaaaaaaagcacagatacctgcttactatacataaaaaaaaatcactgagccaagccaagcttactgaattagaacatctgaaatatattctccttcttctaatatctagaaaacatttgcctttctctagaatactcatacattcctgatactttccaattctccaagttcttagatttttgtcagtgtccaagaaaaaaattgagccataaactatttaaatcaggcatggtatttttattagtttgcctggttgctgcgacagagtccctgaagaacgcagcttaaggaagagtcagttttggctcacagttccaggggacagtcgtcacagcggcaggagcagcaggcagctgctggtcacactgctttagtcacaggcgctcagataactcagtccagaaccccaacccacctgatgatgctgtccacagttggggggagggggtctgtccatctcagttaacctaacctaatctagataacctcataggcacactagaggattgtcacctaagtgactctaggtcctgtcagattagcagggaaaataagtggtcccagtattgtaaggaccacatctcccaatatttctccttgctggatgaaaggaaaatccttagcattgactcttctgcctttttaaaagatagaccatgagaagtgttttgaaaaagtctacaaatatgtatttgtgtgtgcacgctcatataacacacacgcacacaccacacacacacacgcacacaccatacacacaccacacacacaccaccatgatggcttcccttcctcattcaggctaacaacatataggctggagagtgtggtggaagtcaacatggagccctgaccacagagcgccccgtgtagaggacactggacactccggccttccattgggtgtcctccgtggcagccacatagctgaaatcactctcccctccttagctttgtttcttgatatagttgccttctcattttttctgcatctgttttcagcaataatgtattcaaagtctgtacccttgggaatggtttaccaaagtgttttatttgtgattcatttactaaaagggggtgaaactggggccttggcttggttgtggaaccttccataatctctttttcttagtgattggagggaaagagaagagaaagtgagatgaatgagtggatgaataatttaactataatgaatttatctggactagtatttgtcactagtttggggcatctcagtccttgccacttagcattaaaaatatgacatcctaaaaactactgtagagcagaaaccatgccaagttctttagttcagattaaaatgtttatatcagtttttgcctcatacacggataacagttaaaatagggtcggtctgagcccagttattgacttcagaaaagaacaactcacaatcagatctgtctaaaaccccaacaccccgtggagtcaagagggcccatcactctaaccatctgccccaggaaagagcctctacccaagggtggagggctacggactaaccatgtgacatacgtgaggacttgtgctaaggcatgccccttcagagtgccactgtccagaaagctagcctatgaggaaacaatatccaaaaaatatttctaagatccagagcccagatctgggaaaaacctgcaagtccttgagagctttctcacatgggtaaccccagggcaaaatggagccgagaaagggcctcggtggcctagtgcctgggctcacaagggagaacacaagcccaagagagaaaatgcaccagtgatctcactagaaatatcttcctttattttctccttcctcgtgctcttgggaaggaggtctcactacacagggacttccatgaggtcaccccagagttcaggacaggactgagtccagctgtggtattgctagctctgctctcttctttcccacagttctcaggaagcctccaggacctcttgctcccccagaaccaattcgccatgttcttctactgcttcatcttcatccacatcatctacgttgccaaggagacggtcttctttctcttctccaagcactacctgttctgtctggcagccatcttgctgtgcttgattaaaaccttgtggtcctacttccaagtgtcgctgcttcgtccatcgcctacagtgccatctgtgtgttcacaaacccctcccctcccatcgaaacccggctcgatggcacagctgccagctgtggacacctgagcatggagatgcacagccaggacccctgtctcctccccatgggagaacttcagaagttagcaggtttgagggagggtagataatcaaggagggcccagaaaacctttccagagtcagagtcacatccgtgaccaaggttggatcccaacacatcccatgttcacaccggtttttcttctcctctaaattgcgaggttgacatgagcccctcccccaacaaaaatgtccttgtcccaacccccagaatcctgaagttgttgcttcacgtgacaaaagaaactgttgttaaagctgctatttaagagcctgcatcctggaagcattaacagactgagttctgccacatgccctcctccagccacttaggcaatagtgaaaaacagagaggggggctgtgttcagtgtggctacaccagaaagaggggcaactctggggtcctaacacaaagggtagatttccatagagagccaaggctgtacacaacaaagcagccctgcctgcccatcatccctggcttagctagtctctcctacaaggtctgaaaattgtatgaattctctctccaggagacaagttctcctgagctgggcctaggtttcagctttcgtctcctgataggagactcctagggaaatctcagtttcttgtggtctgttgtttcaggagtctgacagccaaaggggtggagcacagatgtctctgggtttagaatatattcattcctgccactacagttacagtgctgagccatgctcaaagaaccttgctgtggaaagggaggctgggttatctaggtagtcccaatgtcatgacagacatgaggagcaatcccacaggctgagagcactgcaggaccacagtcagggcagccagagcttccctgggcaagacaagcaggaaatacagtcacacccccaaacacagagaggaggggggtctttaatgtggctgagactgcaagtaactgagcccagagggagtcaccactgatggtttactgggaaaaaagatgggtggaagaaaaaaaaataccagatacacagagctcaacacaacatacacacacatgcacacatgcacgcacacacaggcacacaagcacatcaaacacacaagactattaaaaatgtagaaacaagccgggcagtggtgacaacagtctttaatcccgtcactgggaaggcagagggcagttggatctctgagttggaggccagccgatctaaagagccaaggctatgcagagaaacctagtcttggaggacggtgggccgaggggagggggagtagggaatgggataaagggtgaggagggcggtagataccaacacagagacttacacagatcatagaacacagtttcctgtagagggatagtctcaagcctgcaaggaaacaggaggctcgacctgagcccagcagcaaaattgcaagatacacacaaaaaagaaaaggatttcagcttctcctacaactccccctggccggcccaccgttcctccgttcctccaccatacctctctgtacagactgtcaactgctctgtttccacctgcccaggcattgagatgccagccagtgctagcactgagattcacacaagggagaaagctcttggtgagtccaccctgaccttcctcccctgtcacagagcttggctgggttctgtgacacttggtgaaacagagaagactatctggggaccacactgtcaggacatattagcctgccatttacgtccacagtgacctcccatcttccaccgagtccggtgcacccatccccacttaaggctgtgtgtgataggcacttataacttgcaaatggtaacactggcatttctcattaaactttcagtgatggaaaggcttgctatggggtcaagtctcaagatcgtttatttgattcaggtttctggcttgagactgaggcaaagattaggagagcaaattgtcacaggcccatctattcatttgtcacagacagaagtgggcaccaggttaaaaaaaacagaaagtcaaggccaccctgtcactcttgttgtctggcagtgctggacctaaatattttggtttatctaagaggaagacggactctgtgaagtcaccggattagcatggcacaccctgggtaatagatacaaactctctttcccactgcccagatctagtgcctaaagactaagagcaggagttaggacctgactctaagttgaggatcttaggaagatccagctctgcacacaatcaccttccaaattaggacaagtctccttgttgaaattcgaagcagacaatccggaaagacacagtcacaaagggcaggaaagaggcacagctaaatggtaaccaacctagcaacaagtcaacacattagcagctcttaagtgcctccgatgccaagtatccagtgcaatgcttaaggaggccagcttgccaagggaggcagggcatgcattaaaaccttcttgcagagaattccaggctcagagaagtcttaccctgaagcacagactcttcccaggtccctacagtcctgcctgctgaggcagctttaacacacaagaacactagagatcacttacagcctagagaccccaggaatgaaggggactgggttggagactgaagccttcctgtaagagcagcccctggagggttaggaaacctgggcaggtgagtgagaaggagaagggaggatgcacacagggatcatcgtagaaggagaaggcatggcgtgctccggctcagatgagtgctgcaaatgctgacaggctggacaaggcctcagccttgtttcgtggtcttgaatgctggtctcaggaatatgaacttgatcctttgggaaactgggagccccgaggcttctaaagaagtggcaagagagaggcttcccctcccccaacccctcccagaagtctggaaaccatactcgccttgaccccctcctcccatttctagtccagacacgttgttctagaggttcagagtgtgagtattataggcagctgttaaaaaacaaaaacaaacaaacaaacaaaaaccagggattgcagcttaacttaaccgaggtctgtgtttgtacagaccaagaagttcatgtggtcagcccaagggctcaaacttgctatgaaatgacagaggactctggctccagactgcccccactgtcctcgtgctaacagctttcgtttatatgctgtggctgcagcccattctctcatggctaccacagctccaggcaccaatccacaggcagagagcaggtggggagaaaagcacagccttttggtttggtttggtttggtttggtttggtttggtttggtttggtttggtttggttttttgagacagggtttctctgtgtagccctggctgtcctggaactcactctgtagaccaggctggcctcgaactcagaaatccgcctgcctctgcctcccgagtgctgggattaaaggcatgggccaccactgcctggctagcactgccttttgaaggctgtccaaactgatcgagggcgcgaggagagggcgagagccttcaatcccagcacccaggaggcagaggcaggcaaagctctgtgagttcaaagccagcctgaactacatagaacttgtctcaaaatcttttgtaaaagccaacaacagcaaaacaaaacaaaacaaaacacacacacacacacacacacacacacaaaaacaaaaatacttccgaagaagtcccaaccagagatttctgattgcatctcattggtcagatacaatcacaaggctgcttctagctacagggcttctgagaaggtaaggttttactatagggagcccaccagagattaccactcagacacactgttgtagacattatttaaaccctgccccaccttaatcatttagttcctggatggaagagtacataaaaccgttatatttacaataaaccttaaacagcataatagctggacaagtatctggctctatgctactagaatctactttcctattgatctatagatctattgatctactttccaattgatgaactgaattattattactacttactatgtttcatctgggctgttcttaattccaattggccagcccacagagccacatcttcttgagtcctaagccatggcaacatctccctcatctatttaccttcctctcctcatggctcttctctaaccccaagcctggaaaacctaaatcccacctatgtctcttctgcccaactattggctgttggcatctttatttaccaggcacaataaactgggggcagggtcacttagctagcatttttgtgtggactctctcatctcttgtctctgggacaaccagttttgggggggggagggcccaaattagcgttacaatacaagcagcatgctggtcgatctactatgcacattttataaacaattgaaagtttttgttccagctggaactatacttgggtattcagaaacccaagtatagcccagggcctttagaccaaggattggtttttaaaaaagcaaaacccannnnnnnnnnnnnnnnnnnnaagcaagcagtttaacagaagctaagataagcagttagctggaggtggagttttgcacaagcaggaagtttaacagaagttaagataaattagcgggagcatctttaaccttgggttcctaaaatagggttgggtaattttccatgggattcttcatcaaggaaatcaaattctggttaaaactgaaatggccttagcaagaatacaagacagaggaccttctgccctgtcacagtttttacctgagcacttttgcagccttaaacaaaactgggattctgataggacaagggcaagggttagtagctgcataagaacttgttgcccaccattcctgctttagcaggccagagttcctgagtcagagccttggttggttgagacaggcaggtggagcatggtggcagccgatcttggcctagccccatgctgtgtccacccgaggaaaggcacaccaggccccaaccacagtcagtagtggacagctcatggcttcacccagacgcatgcatgcctagatctgacccaacatctatcaccagggcagcagccctgcttggggacttagacaggtacgttcaaggctagagtctctcttcttcctgatctcagatcccacagaacagagccaactgttggtcgggggatctgagctatggtcctacacccagctgctaaaggttgcctcacaaaaaagaactcactaccaaggtccactccgctttagcccaaataaacaaagccctaacaacatttcaaataggcataagaggagaaagacaccagtttgtctccctctaaatagaatgtcatcgattgccaacccaagtccaaggataagctagagctaagagactactgtcgtttactggaggggaaggacagcagacacagttctaatggccacttccctcacttttttctgttatcacccctgctgaacaggtgactacaagtcctttaattttcttgggtatcattgaagtgacgtggaaatatctagaaactcagtgagaaaaataaaggcttattaactaatataactaattaattaatacagcatctggttcagttgacccagatatgattgtatctagaggtgactttcagcatcagtggagctgggggactccatatagatatggcttcctgggtcccatcccaagtcctgagtcagaaacattgtgataggttccaccccagccaggagcctgctgcctaggctgaggctccattcttttctctgactgtaaggccctgttgtggacctggaggactttccaaagggataaaaggacaaagatagaaaatgaggtgagaagaggaactgagtgtgggtcctaaaagtgctgtgggggcctccacctccacctggcatggtcaaacgctagccagagtgggtagcatggccgcaggacaccaccgtcagtccctcctccctctgnnnnnnnnnnnnnnnnnnnnnnnnnnnnnnnnnnnnnnnnnnnnnnnnnnnnnnnnnnnnnnnnnnnnnnnnnnnnnnnnnnnnnnnnnnnnnnnnnnnnnnnnnnnnnnnnnnnnnnnnnnnnnnnnnnnnnnnnnnnnnnnnnnnnnnnnnnnnnnnnnnnnnnnnnnnnnnnnnnnnnnnnnnnnnnnnnnnnnnnnnnnnnnnnnnnnnnnnnnnnnnnnnnnnnnnnnnnnnnnnnnnnnnnnnnnnnnnnnnnnnnnnnnnnnnnnnnnnnnnnnnnnnnnnnnnnnnnnnnnnnnnnnnnnnnnnnnnnnnnnnnnnnnnnnnnnnnnnnnnnnnnnnnnnnnnnnnnnnnnnnnnnnnnnnnnnnnnnnnnnnnnnnnnnnnnnnnnnnnnnnnnnnnnnnnnnnnnnnnnnnnnnnnnnnnnnnnnnnnnnnnnnnnnnnnnnnnnnnnnnnnnnnnnnnnnnnnnnnnnnnnnnnnnnnnnnnnnnnnnnnnnnnnnnnnnnnnnnnnnnnnnnnnnnnnnnnnnnnnnnnnnnnnnnnnnnnnnnnnnnnnnnnnnnnnnnnnnnnnnnnnnnnnnnnnnnnnnnnnnnnnnnnnnnnnnnnnnnnnnnnnnnnnnnnnnnnnnnnnnnnnnnnnnnnnnnnnnnnnnnnnnnnnnnnnnnnnnnnnnnnnnnnnnnnnnnnnnnnnnnnnnnnnnnnnnnnnnnnnnnnnnnnnnnnnnnnnnnnnnnnnnnnnnnnnnnnnnnnnnnnnnnnnnnnnnnnnnnnnnnnnnnnnnnnnnnnnnnnnnnnnnnnnnnnnnnnnnnnnnnnnnnnnnnnnnnnnnnnnnnnnnnnnnnnnnnnnnnnnnnnnnnnnnnnnnnnnnnnnnnnnnnnnnnnnnnnnnnnnnnnnnnnnnnnnnnnnnnnnnnnnnnnnnnnnnnnnnnnnnnnnnnnnnnnnnnnnnnnnnnnnnnnnnnnnnnnnnnnnnnnnnnnnnnnnnnnnnnnnnnnnnnnnnnnnnnnnnnnnnnnnnnnnnnnnnnnnnnnnnnnnnnnnnnnnnnnnnnnnnnnnnnnnnnnnnnnnnnnnnnnnnnnnnnnnnnnnnnnnnnnnnnnnnnnnnnnnnnnnnnnnnnnnnnnnnnnnnnnnnnnnnnnnnnnnnnnnnnnnnnnnnnnnnnnnnnnnnnnnnnnnnnnnnnnnnnnnnnnnnnnnnnnnnnnnnnnnnnnnnnnnnnnnnnnnnnnnnnnnnnnnnnnnnnnnnnnnnnnnnnnnnnnnnnnnnnnnnnnnnnnnnnnnnnnnnnnnnnnnnnnnnnnnnnnnnnnnnnnnnnnnnnnnnnnnnnnnnnnnnnnnnnnnnnnnnnnnnnnnnnnnnnnnnnnnnnnnnnnnnnnnnnnnnnnnnnnnnnnnnnnnnnnnnnnnnnnnnnnnnnnnnnnnnnnnnnnnnnnnnnnnnnnnnnnnnnnnnnnnnnnnnnnnnnnnnnnnnnnnnnnnnnnnnnnnnnnnnnnnnnnnnnnnnnnnnnnnnnnnnnnnnnnnnnnnnnnnnnnnnnnnnnnnnnnnnnnnnnnnnnnnnnnnnnnnnnnnnnnnnnnnnnnnnnnnnnnnnnnnnnnnnnnnnnnnnnnnnnnnnnnnnnnnnnnnnnnnnnnnnnnnnnnnnnnnnnnnnnnnnnnnnnnnnnnnnnnnnnnnnnnnnnnnnnnnnnnnnnnnnnnnnnnnnnnnnnnnnnnnnnnnnnnnnnnnnnnnnnnnnnnnnnnnnnnnnnnnnnnnnnnnnnnnnnnnnnnnnnnnnnnnnnnnnnnnnnnnnnnnnnnnnnnnnnnnnnnnnnnnnnnnnnnnnnnnnnnnnnnnnnnnnnnnnnnnnnnnnnnnnnnnnnnnnnnnnnnnnnnnnnnnnnnnnnnnnnnnnnnnnnnnnnnnnnnnnnnnnnnnnnnnnnnnnnnnnnnnnnnnnnnnnnnnnnnnnnnnnnnnnnnnnnnnnnnnnnnnnnnnnnnnnnnnnnnnnnnnnnnnnnnnnnnnnnnnnnnnnnnnnnnnnnnnnnnnnnnnnnnnnnnnnnnnnnnnnnnnnnnnnnnnnnnnnnnnnnnnnnnnnnnnnnnnnnnnnnnnnnnnnnnnnnnnnnnnnnnnnnnnnnnnnnnnnnnnnnnnnnnnnnnnnnnnnnnnnnnnnnnnnnnnnnnnnnnnnnnnnnnnnnnnnnnnnnnnnnnnnnnnnnnnnnnnnnnnnnnnnnnnnnnnnnnnnnnnnnnnnnnnnnnnnnnnnnnnnnnnnnnnnnnnnnnnnnnnnnctctctgagcaagtctactggagctttggatcctggagttgccagaaccatgaatgttgaggctgtacatcccacccaatttctgggtccagcagtaattccacaggggggtggggaagaacaaaaaagggcaaggggagtctggtcaagagcctgggagctcatagtgtgacagcttgcaagggggcatcttgtccaagttcttccagtatgtttgctctgtgcagtgcactccttgggcgggtcactccgtggctacctagtcttaagctgttcagatcgccacaacaaatcgcacaggtagcttaaacagcatgcgtttcacccagttctagaggttggaagcctcagagcgaggtgctcttcccggtctgagcttctcctcagacctgggcttacagatggctttcctctgcgtagacacaacccaggtgtccaacatgtctttgttgcatggctctttctgggaaaacatagagatgtctgaccatcccaagtactagagaggagaaaaagaagaactccattgaagttcggcccggtggattaatgaatttattaggatggtttgcagaagcagctatgaaaccctcagaagatgtcccgggttatttataggaaggtaaacccttgagacatcccacctcagtcaaccttcgattcttagataatcttagggaggagcagagcctctgaaggtctccccaaggttgcctgagcctccagacttcctgcagtgtgctcacagcctgacaccatggagggcttgagtgcgtcttcgtaactgcagtgccttaatggtgacgaaggccatggccatggaggaaatcacagtaagggtgtcactcacacgtcacagaggcctcatcttagttacatctttaaaagccctgactccaggggccagagatacaggtcattcattcagtataaaacatttgccttgcaagtgcaaggaccaaagttcagtccctagaaaacagtaacaaaaaagccagacgtggtgacacacacttataatcgtgcttatcacagcagtggaaagacaaaaacatatcacatacatacaatcctcagcacacatacccagcacatactacatacaccatatgtatagacataccacacacatcaaacatacaggcttatgctatacacacacatgccccaaacatacagacatatgtcacacatacattctactcaatacacataccacacacatgcatacatagcatacacatttatacacactattgcctgctaccacacacacataaacatatcatacatataccacacaaacattttacatacacacacacagtacacatatacacatatacccnnnnnnnnnnnnnnnnnnnnnnnnnnnnnnnnnnnnnnnnnnnnnnnnnnnnnnnnnnnnnnnnnnnnnnnnnnnnnnnnnnnnnnnnnnnnnnnnnnnnnnnnnnnnnnnnnnnnnnnnnnnnnnnnnnnnnnnnnnnnnnnnnnnnnnnnnnnnnnnnnnnnnnnnnnnnnnagccaaattataaacttcagatactaaatgctccaagttttaaggcttgctaatcgtgctggacttccatactgttttcttatgtcttgtatcatgcagtaataaaaacaattccactgagttaaggtttggaacaca

SEQ ID NO: 246 - DNA, 676 bp, Mus musculus
ttgtcttaaaagatgtcctgtggccctggtccgcagcacggtggttatctggatggcgatggaggacagggaggtgatggaagcccgaggggcaggagaaagctgccccacactctccaaggtggcccctgttgacagcatgcctgaaggcaagccaaaggcctctttggatgcagaagtccccaaactagaactgcctaccctggaagagaacgggatctgtgaggacagagattgtccggggccccctaggtcattgcctccaaagtccggcccaaacgccaagggtcaggctggcgatggacctggactggagtccgtagagctgcccctgcccctggagacagaacaccgcaacgcgatggagctggagaaggtgcgcatggagtttgaactgacgctcctcaagtacctgcaccaggagaacgagcggcagaggcagcatgaggagttctcaggaagcctccaggacctcttgctcccccagaaccaattcgccatgttcttctactgcttcatcttcatccacatcatctacgttgccaaggagacggtcttctttctcttctccaagcactacctgttctgtctggcagccatcttgctgtgcttgattaaaaccttgtggtcctacttccaagtgtcgctgcttcgtccatcgcctacagtgccatct

SEQ ID NO: 247 - protein, 221 aa, Mus musculus
CLKRCPVVRSTVVIWMAMEDREVMERAGESCPTLSKVAPVDSMPEGKPKASLDAEVPKLELPTLEENGICEDRDCPGPPRSLPPKSGPNAKGQAGDGPGLESVELPLPLETEHRNAMELEKVRMEFELTLLKYLHQENERQRQHEEFSGSLQDLLLPQNQFAMFFYCFIFIHIIYVAKETVFFLFSKHYLFCLAAILLCLIKTLWSYFQVSLLRPSPTVPS

SEQ ID NO: 248 - DNA, 24861 bp, Homo sapiens
cgaggctgctgtgcactgtgccgtatcaccctgccctccccatccttccacttcaccagactgaactgggctgggcaccttccccatctgataatgatcctcatcatctgttgcctctatgtttcctctctgcccttcccctaggaggcatacctccatgaaactgcattaattcattaaccaaaacaatacaaagcaacacagagtctagcattctcattttcctgtctctagataccagtccttcagggaattttccagaagttgagaagactggttgcatgagccttgggttggtttggcactcgtgacagtgtgaaaagagcctccgcctcctccactgagctcagagaaaggtttatagtaaagccatttgcaggggtaagggagacaggatcacatggtagcccaataacaggcttccctagaatgaaaagctctgtcccagtagagataagccaggttattctgattcctgcccttggaaaggtctaccaggaaatcatgagtgacttaagtaggacaaacaacacagaaggcataccgagaggccatacagttgaggctatgaagaaccattagaagctgaagttatgagtaagctgaagtcaggaggaagcaggaaccttgcctacagtgaagtatgaggttggaggttgtgggttgacgggggtgaggaaggctgttgatgggaagtgaggggacacggagaagcagaaacaccgaaatcagctgagttatacgaatgacaaggcacatgtgaagctgcaccaactctggctgctggtctcagaattgccctgaatccagcacagtccctgctaggccagctcatccctcatccctgttgctgggctcccacgtgttcttgtctcctttacccttgcatatggctttactatacacttcctttctctgaactcaacagagaaagcagaagctcttttcatactgtcaccagtgccaaaccgacccaaggctcgtaagacctgtttcctccacttctgggaagttccctaaaggacaggggtctagagacagggaaatgagaatgctagactgtatgttgctttggaatacattgctctgcttaatgaattagtacactttcatggaggtctgcctcctaggggaagggcagagaggagaaacagaaggcaacagatgatgaggatcaattgacactttactcatgctgatcctttcctctcacccaaatcccacccacccttcatgttccctcttccaccaaaccttcctcagttactccagccacatcaaccctgatcctttttttttttgagttagtcagactctgtcacccaggttgaagtgcagtggcaagatcacagctcacttaagtgggctcaagcgatcctcacacctccacctttcaagtagctaggaccccaagtacatgctaccatgcccagctaatttttttttttttttatagaggtggattcccactatgttgcccaggctggtcttgaactcctgggctcaagcgatcttctagactcagcctcacaaagtactgggattacaggcatgagaccctgagccctgacctcttgactcctatggtacattgcctgattggccccagttcttcatcccctatatcgagaccttttatctttctttgtggttcctcccactaactgggcagagtacgtttcaccatcctttgagtttccccatacaactggctttctccaataacataagatggaagtgatggtgtgccagctccaaggcctcttgtacttcttccatccccgagcaaagggtatgcctaagctaccccactattcccaagaggaagataagagacacatgaaacaaagctgcctcggccaagctcccccagttgaatccagcctaaatcagcctacctttagatgtctgagctaaggaaatgtttattgttgtgggccactgatcatttagggttgtttgatctatagctgacaactacccatagtacttattgtgcatttccatacttggtgatttaacagcagtggattatttgtacatatgtcattgtttctttaagcagatctctgctggttaagattgccaggtttaacaaataaaaatacaggattcccagttaaatttgaattacagacaaataactttttagaaatctgtcccatccaatttttagaacatatttatactaaaatttatgtaaaattcagatttaactgggaatcctgtatctatctggtaatcctactcctagtagtgcctgaggcaggatagatatcttacacaacagctgtgagatcatttacatggtcaccaccataatgttgggaggggaaagccatggttcagttaacgatttgcaaagacagaaagtgaaccttgagcattctcctctccccagtggcaaaatctactgctcagaataatggtgatcatggttatcttttgcctagtccctgtatgggcagcttgtgggctaaacaccctatctaatttattattatacttaagttctagggtacatgtgcacaatgtacaggtttgttacatatgtatacatgtgccatgttggtgtgctgcacccattaactcatcatatacattaggtatatctcttaatgctatccctcccccttccccccacccctcaacaggccccagtgtgtgatgttccccaccccgtgtccaagtgttctcattattcaattcccacctatgagaacatgcggtgtttggttttctgtccttgcgatactttgatgagaataatggtttccagcttcatccatgtccctacaaaggacatgaactcatcattttttatggctgcatagtattccatggtgtatatgtgccacattttcttaatccagtctatcatccatggacatttgggttggttccaagtctttgctattgtgaatagtgccgcaataaacatacgtgtgcatgtgcctttatagcagcatgatttataatcctttgggtatatacccagtaatgggatggctgggtcaaatggtatttctagttttagatccttgaggagttgccacactgtcttccacaatggttgaactagtttacagtcccaccaacagtgtaaaagtgttcctatttctccacatcctctccagcacctgttgtttcctgactttttaatgatcgccattctaactagtgtgagatggtatctcattgtggttttgatttgcatttctctgatggccagtgatgatgagcattttttcatgtgtctattggctgcataaatgtcttcttttgagaagtgtctgttcatatccttcacccactttttgatggggttgattttttcttgtaaatttgtttaagttctttgtggattctggatattagccctttgtcagatgggtagattgtaaacatttttcccattctgtaggttgcctgttcactctgatggtagtttcttttgctgtgcagaagctctttggtttaattagatcccattggtcaattctggcttttgttgccatcgcttttggtgttttagtcgtgaagtccttgcccatgcctatgtcctgaatggtattgcctaggttttcttctagggtttttatggtttcaggtcaaacattaaagtctttaatccatagtgaactaatttttgtataaggtgtaaggaagggatcctgtttcagctttctacatatggctagccagttttcccagcaccatttattaaatagggaatctttccccattgcttgtttttgtcaggtttgtcaaagatcacatggttgtagatgtgtggtattatttctgaaggctctgttctgttccattgatctatatttctgttttggtgccagtatcatgctgttttggttactgtagccttgtagtatagtttgaagtcaggtagtgtaatgcctccagctttgttcttttggcttagggttgtcttggcaatgtgggctcttttttggttctatatgaactttagagtagttttttttttctaattttttgaagaaagtcattgatagcttgatggggatggcattgaatctataaattaccttgggaagtatggccattttcacgatattgattattcctatccatgagcatggaatgttcttccatttgtttgtattctctcttatttccttgagcagtggtttgtagttctccttgaagaggtccttcacatcccttgtaagttggattcctaagtattttattctctttgaagcaattatgaattggagttcactcatcatttggctctctgtttgtctgttattggtgcataggaatgcttgtgatttttgcacattgattttgtatcctgagactttgctgaagttgcttatcagcttaaggagattttgggctgagactaaggggttttctaaataaacaatcatgtcatctgcaaacagggacaatctgacttcctcttctcctaattgaataccctttatttctttctcctgcctgattgccctggccagaatttccaacactatgttgaataggagaggtgagagagggcatccctgtcttgtgccagttttcaaagggaatgcttccagcttttgcccattcagtatgatactggctgtggggttgtcataaatagctcttattattttgagatatatcccatcaacacctaatttattgggagtttttagcatgaagggctgttgaattttgttgaaggccttttctgtatctattgagatactcatgtggtttttgtctttggttttgtttatatgatggattatgtttattgatttgcatatgttgaaccagccttgcatcccagggatgaagccaacttgatcgtggtggataaactttttggtgtgctgctggattcggtttgccagtattttattgaggatttttgtatcgacgttcatcagggatattgatctaaaattctctttttttgttgtgtctctgccaggctttggtatcaggatgatgctggccttgtaaaatgagttagggaggattccctctttttctattcattggaatagtttcagaaggaatggtaccagctcctctttgtacctctggtagaatttggctgtgaatctgtctgatcctggactttttttgcttggtaggctattaattattgcctcaatttcagagcctgttaattgttctattcagggattcaacttcttcctggtttagtcttgggaggatatatgtgttcaggaatttatccatttcttctagattttctagtttatttccatagaggtgtttatagtactctctgatgatagtttgtatttctgtgggatcggtggtggtagcccctttatcattttttattgtgtctatttgagtcttctctcttttcttctttattagtcttactagcactctatcaattttgttgatcttttcaaaaaaccagctcctggattcattgactttttgaagggttttttgtgtctctttctccttcagttctgctctgatctcatttatttcttgccttctgctagcttttgaatgtgtttgctcttgcttctctagttcttttaattctgatgttagggtgtcaattttagatctttcgtgctttctcttgtgggcatttagtgctataaatttccctctacacactgctttgaatatgtgccagagattctggtgtgttgtgtctttgttctcattggtttcaaagaacatctttatttctgccttcatttcattatgtacccagtagtcattcaggagcaagttgttcagtttccatgtagctgagcggttttgagtgagtttcttaatcctgagttctagtttgattgcattgtggtctgagagacagtttgttataatttctgttcttttacatttgctgaggagtgcttgacttccaactatgtggtcagttttggaataggtacgatgtagtgctgagaacaaagtgtattctgttgatttggggtggagagttctgtagatgtctattaagtctgcttggtgcagagctgagttcaattcctggatatccttgttaactttctgtctcattaatctgtctaaagttgacagtgggatgttaaagtctcccattattattgtgtgggagtctaagtctctctgtaggtctctaaggacttgctttatgaatctgggtgctcctatattgggtgcatatatatttaggatagttagctcttcttgttgaattgatccctttaccattatgtaatggccttctttgtctcttttgatcttcgttgatttaaagtctgttttatcagagactaggattgcaacccctgcttttttttgttttccatttgtttggtagatcttcctctatccctttattttgagcctatgtgtgtctctgcacgtgagatgggtctcctgaatacagcacactgatgggtcttgactctttatccaatttgccagtctgtgtcttttaattggagcgtttagcccatttacatttaaggttaatattgttatgtctgaatttgatgctgtcattatgatgttagctggttattttgctcgttagttgatgcagtttcttcctagcatcgatggtctttacaatttggcatgtttttgcagtggctggtaccagttgttcctttccatgtttagtgcttccttcaggagctcttgtaaggcaggcctgatggtgacagaatttctcagcatttgcttgtctgtaaagcattttatttctccttcatttatgaagcttagtttggctggatatgaaattccgggttgaaaattcctttaagaatgttgagtattggcccctactctcttctggcctgtagagtttctgccaagagatctgctgttagtctgatgggcttccctttgtgggtaacctgacctttctctctggctgcccttaacattttttccttcaactttggtgaatctgacaattatgtgtcttggagttactcttctcgagaagtatctttgtagcattctctgtatttcctgaatttgaatgttggcctgccttgctaggttggggaagttctcctggataatatcctgcagagtgttttccaacctggttccattctccctgtcactttcaggtacaccaatcagatgtagatttggtcttttcacatagtcccatatttcttagaggctttgttcgtttctttttactcttttttctctaaacttctcttcttacttcatttcattcatttgatcttcaatcactgataccctttcttccacttgatcaaatcggctactgaagcttctgcatgcgtcatgtagttcttgtgccatggttttcagctccttcaggtcatttaaggtcttctgtatgctgtttattccagttagccatttgtctaatcttttttcaaggtttttagcttctttgtgatgggttcaaacatcctcctttagctcgcagtgtgttattactgatcgtctgaagccttcttctctcaactcatcaaattcattctccgtccagctttgttccattgctcgcgaggagctgcattcctttggagaagaggtgctctgatttttagaattttcagcttttctgctctggtttctccccatctttgtggttttatctacctttggtctttgatgatggtgatgtacagatagggttttggtgtggatgtcctttctgtttgttagttttctttttaacagtcaggaccctcagctgcaggtctgttggagtttgctggaggtccactccagcctgatccttgctctagaagcttcatctcagaggggcacccagtggtatgaggtgtcagtcagcccctactgggaggtgcctcccagttatgctacttgggggtcagggacccacttgaggacgtagtctgtctgttctcagatctcaaactccgtgctgggaaaaccactactctcttcaaagctgtcagacagggacgtttaagtctgcagaagtttctgctgccttttgtccagctatgccctgcccccagaggtggagtccacagaggcaggcaggcaggcctccttgagctgtggtgggctccacccatttcgagcttcctggctgctttgtttacctactcaagcctcagcaatgacagacgcccctcccccagccttgctgccgccttgcagttggatttcagactgctgtgctagcagtgagcgaggctccgtgggtgtgggaccctccaagccaggaacaggctataatctcctggtgtgccatttgctaagaccgttggaaaagcacagtattagggtgggagtgttctgattttccaggtactgtctatcatggcttcccttggctaggaaagggaattcccccaccccttgcacttcccgggtgaggcgatgcccctcccttctttggctcatgccccgtgggctgcacccactgtccgacaagccccagtgagatgaacctggtacctcagctggaaatgcagaaatcacctgtcttctgcgttgctcacgctgggagctgtagactgcagctattcctattcagccatcttggaactccccctcctaccctatctaattttcacatcggtgctgcaacgtagggaagtggctaaatctttatcccatttacaaatgaatacactttcccttgatcacacagccggagagagtagcgaagctggaattcaaatgcagccctttgtctttccatattgcaatcctgctttcaactaccaaagatgttttgctgcttttttcacaaaatggaagatgacaaaatacattccccagccctccattctacccacgtggaagtatgaatgatgggttgtattagtgtcctaggtttgctgtaaccaagaaccacagactggttggcgtaaatgacacaaatttattttctcgcaatcctggagagtcagcatcagagatcaaggtgccagcagggttggttccttctgagtgctaggagagaaggatctattccaggtctacgatggttaattttacatgttgacgtcagtgagccattggatggccagatctctgattaaatgttatttctgggtgtttctggaagagattaacatttgaattggtggactgagtaaagcagtctgccctcctcaatgtgggtgggattcatccactccactgagggcctaaatggaacaaggcagactgccagttgaactggtgctctcaattcaattgcctgactacatgaggtgatccgtcagtcttctcctgaccttggactgggacttccaccatcagtgctcctggttctcaggcctttgcgctcagactggaatttataccacccgctttccagggacaccagcttgcagatgggagatcataaaacttctcagcctccataattgcatgagccaattctgtgtaataaatgtcattttatgtttctttggagaaccctaatacaatgccggtctccttggtttgtagatagccattttctcccttgtcttcacatcatcatcttcttacaaggacaccagtcatactggattaggatcccaccctaatgatctcactttcacttaatcacctctataaagaccctgtctccaaataaggtcacattctgaggtactgggggctgggagttaatacttcaacatatgaattttgggaagagagggggacctggtttagcccataacagggtttgtggagctgtgactcatttccaacacaatcttcatttaaaaaaggaacccaaggaaatggatttcaaatggtggaattctgagttgcatgagttggaactctagttttcaaagccatccttatgggcagcaaaggcccatcctgcagttcttaatgttagcatgttactacctcaaaggtgtcacaccctccaccaaaggggccctagcaacttgtagaatgtaggctatgatgacgacaggggattgtgatggtggccaggctgtggaatctggtgaggccaaatgtcagcacctcaaatgatgtcttgtgaccccacctggcagcgttctggttttctggatggcagcagaggacagggagatgatggaagcccggggtgcgggagaaagttgcccgaccttccccaagatggtgcctggtgactccaagtctgaagggaagccaagggcttatctggtaagggggctgctgtgtctcaccacccccgcctattccgtcagggggagcaagaatactgtaggaacacatgctttgagcttccagacaactgccaagaacatcaggtgacatgtaccccagccctgtaactggcaccagctgtcaccagggaccaggtagccctccataagattgtgaagtcatatgaagctgggtttggtctcctctatctacctccccacttggggtcctttccttgctgggtggataggacctggctccccaccatagccctcttcctggtccccaaatatttaggttctctcaattcagaccctgggtttctttctccctctgtaacttcctgaagacctggcatctaactgacctcaaagtcaggtagagttgaggatgggcccggaagttgcctctttggtgatcagaaaaatcactagaaaaatggacatcaatctactcaactcccagtgcctccacttgcaactttagggcactattactttgtgctagtttgccctctccttgacccgcaggtcctgacaactcccggtaagagcacttctaataagaattcagcctagatctttacaattcaaacaccccagtccactgcggcctggggctgcgggagttccatggggtcaggggcagccccatcctgactcttcaaggtacctcccctccctgcttcccctacgccaggaggcagagtcccagaagccagactcctcctatgactacttggaagagatggaagcttgtgaggacggaggctgccaagggccgcttaaatcgctgtcccccaagtcctgccgtgctaccaaaggccaggctggcgacggacccaaacccgcagagctgcccccgacccctgggactgagcgcaatcccgagatggagctggagaaggtgcgcatggagttcgagctcacgcggctcaagtacctgcatgagaagaaccagcggcagcggcagcacgaggtggtgatggagcagctgcagcgggagcggcagcacgaggtggtgatggagcagctgcagcaagaggcggcgccccgcctggtgggtgacaaggaacggggcactgggaggagggaggcctggagctgaagtcccatggggcctggagcaggcgcccaccttccctgctttgcgcggcaccccaccctgcagatcctggatctcggctgaaaggggctgagcatccactcgggcggtctccagccctctccgccttggctcacttccagagatgtctgctcactgccttaaagctcgctaccctacctggccagctctgttaaacagagcttccacgggaagctgagatgtgactctctaaggagagctgaggccgggagggtccccagaaccacatcgcccacccgacagcctttttggtagcttcaaggaaaagtcttcaacatttcctccctcttccaccgctcacaagtcctctctgcatctcttaaaatttgatgcctggagactagacccagaatccccactgcaccctggccagtggattttgatagaaccatcacctccccgatcagggctatgtttattctgttggatcatactgccttctagtcaactgaaacagccatcttttcacaagaagtacaccactgttccctaatctgtattaaatgggggataagaatgcctacttgagattaaatgggatgtgaagagcttagcacagtggctaggctatcataagcattcaatagtggaagatgttgtttaaagcagtgtttcctgcactttaaagtcagaaagtcctggattaaaatgccagttataaactccctgacattgggcaaattactaatttcctttgagctttggcttgctcatccatgaagtagtacctacctcacagggttgttgtcaggaatcaatgagagaacacacgcaaagcactttgcaattagcccagcacattaggtaagcactcaataaacgttagctactaccatttttatgtactcatgcaattcacttcttgacccaaatgcaacaacatacatttatcacttttcagttttattgggatatgatgtattagctgtgcttcccagctctgagtcatcctcagttctgagaaccatgccttctgcctttatccaaatcattgctgtaattgttgaggaggaaatgacctaaagtaaataccactaaatgtctctgtataggttggcaatgttccattaatcatcacccttgagttacattttatcctgctcacatttctccaccttatccaaaaaacggagacgcactgtcaaatggtttcccaaaattaagatattacattacctatagcatttccccaattgactggtccagttttgtttctgtttttttaagaaagtaaggttggttttgcatcatttgttctcaatgagcacgtgctggcttcttaaacaattatctttttttctgttcacaaaatacctgcttcattataaacatgaaatgatttcactgaactcagtcaagcttactgaacttggatttccagaatcttcccctgcccccacaccctttttgaaaagtctagaaaacatttgcctattgcttagactttagcacacttcctaatatttttgaattctaagttccatttgcaaacttgtgacttttctcagtagcctgggataaaatctgtcacaaagtggaacctgaaactatttaaagcagatatgatattgtaactatgcctttggcctgtgtctcctcctaaccatatttattttccccccttttcagtttgaaaatctttctccttgctggatgagatggaaatctttggtatatagtcctctctctatttctctcttctgctcaagaattagaacattgaaagtattttgaaaagtctaaagggtttcacaagcactttcttttttaatgaaagtcataatgatcactcatcagcatttcagactgaaacacgtgcagactgcagacaggtggcaaagtccaggggtccagagccatactgagcctgcagagaaccgtcgggtcagccccgtcctccactcccattagaacactggattgcttcctctggtctccaaccttcctagctattcattttagaggcagcatcatcaggtcattttctgtcccctcagtttggtctagttgccctcacattttatgcagctgtttcaacagtgatgtgtccccatcctccagcctttggtgatagtttacaaaagtgcttactttttgtgcatttactaaaaattggggagttgacttgatgttgtaccttcctctcttctctttttctgggagggtgaatagatggacggacagagagagtgtattgaattgaaaatacctctttgagtgtgtttctagctagtttagggcatctcggtccctgccacctggtgctttccaaaaatatgccatgatttttacaaatattttaaaaaataatgcatgggttatgccctcttaactatggatcaaaataatatcagcttttgccttacttatacattgatactttctacagttaaaatgaagactgttgggccccagttatatagattcaagaaaagagcaacccacagacagaattagccagacagctcaagctgctttcccccagcccaaatactctgagggtttagggagaccccatcacctatctctcagcacctgcctccaagagacaccaaaccctggactgaaggaccatgggctgacccacgtgatatgtgtcaggacccagggagtgagaaacagtcatttatatgcaagggacaccatgtcattgggccactgtccaggaaactaggttgaatgtcagggcactgtgagagaacactcccaagacccaacatccacatgtggggctcttggagtcagagggagaagacccacgtgtgtggctccaatgggccgtacagaccataaagagaaaggaaggtggtggcctggcgccccagtcaggagggataagagcagctcaaaaagtaaaaaatgatgagttccttctatgtgctagttacctgactaggaatgttcattatctcacttttcctccttgtgatcttttgttttgttttatttttttaagaaacaggatcttgctgtctcacccaggctgaagttagtggcatgagcatagctcaccataaccccgaactcttgggctcaagtgatccttccacctcagcctcccaatagatgggactataggcacacgccaccagatttggctaatttttaaatttttttttatagagataggggtctcactacattgcccaggctggtctcaaactcctggcttcaagcaatcctcccaccttggcctccccaagtactgggattataggtatgagccaccttgcccagccctcatgattttggaaatgggcactattaccctttctttaggtgaagatgatgacttgaggtcacatacaggcagggtcagagcaggactgaacctagatctgcctggcgccaacaatggcatcatcatctccactgtcttctctcccccacagttttcaggaggcctccagaacttcctgctgccccagaaccagtttgccatgttcctgtactgcttcatcttcattcacatcatctatgtcaccaaggagatggtcttctttctcttcgccaagcactacctattctgcattgcagccattttgctctgtttgattaaaactttctggtcatacttccaagtgcctttgctctctccctcactgggaaccctcgcccctgccatgctagagtgttatccgtgcatgatcccagcctcccaggcacctccttttttcactttgtgcctctgtccaatcagaatccactcttaggaagggccctgctgtcagtcatttacacctgagagtgaagaaacacgttcatgccccttatacagaaactgagttctcactgtggacatgatgccttatcccaagaggacgatttcagatgttagcaggtcagggagatatctgcagggaaggtgggtttagaacacctttccagaaccatagaagtacatcatgaccaagctggcttgggtttcaccacatctactcatgttcatagacctctgaggggtgggaagcctgtgatttgcttgggagcagcccccgcccccatcttctgcaaagatgtccatgtcctaatccccaggatcatgaatactttatatggcaaaagaggctgagatgtgattgtgtttaaggaccttgcagtggggaaatgatcccagattatccaggtaggcccgcggtagtcacaagggcccttgtaaaagggaggcaggagggtgcgagtcagaaaggagatgtgaccatggaagcaggggccagaatgacgtgggactgcgggtcagggaacatgggaagcctctagaaaccagaaaaggcaacagaaggattctctgctagagcctccggagggagcccagccctgccaccccatgttaggctcctgaagccaagatgcccaagctccctccagcttgccaacatggcaggataccatcaccaggccactggccaggactcatttagcactgggcctgaggagacttgtacacagctggccttcagacagcatatggtcaaaaaggagaggcagtgaagctccagcgagcctggcacaggcctagctgaacctggtggacaaggggtacccctatcactaagctgtgtatcccctgggtgaggcatgtggcaaaataagggcatactcctaggggacataaggaaggaggaattaagtgcctgattagacccagaggacgtcattaattctactctattagaaagctggacatggaaaaaaaaaaagttgacacacacccccaccccgtacccacctactaacccaagcacacagactcacaaaaatgcagaaaagctaacccagaaacaaatacactgacacagagatacaaaacaagtatacagttgtccacagtagagaggtttacagcccctcaaataaacacacaacaacccaaaggaacagactttgaacaccagaaggctcacggtcaggcacaaagtgaagctgccctgcaagtatgcaacaaaggggttcaactcccccagtcaccagcccctcagcccttcaatacacacactccttgcagactgtcggctactctgagcccagcagcccagccacgatggctggctgtgccacaggacactttagtgataatgtggcaaactgaatgaggctggacacagctgtgcaattaatcaagtctttactgaccccttctctcctctggcatagggctctgccttaagagtgacaagagaataagtttctgtctcattgggctctcgagcgactctcagtaaaatcacgtgaaaaaaatgactgccttgggacttcaatgtcagtacacattatcatgccatgtaagtccatggtgacttctcatttcccacccaactccatatatccaaccccattgatagctgcatgtgacaggtacttaatttggaagtgataaaagtatcatttctcattaaactttcaaggaagggccgttgtggtatgggtcacttcttctgatcattttatttgatctgggtttctgccccatggggttgaggtgagagagatggagataaggatagcaaaaagtttaaggtccacctgtttaccttcttagagcagacagaactgggcatttataaaacacacacacacacacacaaaccaaaacacccaagtgcgtaaggtcatttaatccatccatctgttgccaggtaaaactagacttaaatacattcatttttcttaatcttcagagaaagtaaactcccctgaacggttaagtgagcatctcatcccacatgtttagccacaggcatgaaatctactcttccctattgtgtttgaatactgaagccactagcctcagatctgccctctaggaaaatgagaactactcatggtcactccctaaacttagaacagatcttctgattcaaatgcaaagcagaaaatcagaagagagagggaggcaaaggataggaaaaaggcccagctaagcagttaccagccaggtaacaagccaatgtacaagcgcctcttcagcaccaatgctaacataccatgcgccctaagtccctaaggaggctatcttcaccaaaaccctgcaggtagaaatgtatatcatctccacttcacagccagggataccgaggttcagagacgttagacttaactgagatcatcccagagcacatgttctttccatgttaccctgctcccaagatcctaccttgggaggatctcacaaccttgctggggagatgagtttaacacacatgaaaatgtaaagcagctatcagtacacagacctcagctataaacgagatcatagaagagctccctggagccctgggtgatagaggaagtcttcttaaaagacgagctcataaggctaggtaagcccgaacaggtggaaatcaggagggatacctcacacaaatgaagattagggtgggagtgtgtaacgtgtatccaggagggaagggtcactcttgctccagggaatggtgtacaaggtaacaggcctggaaaattggtttggggctaagtgttagggagccttgaatattggtctgaggaatataaacttaatcccttgggaaataggcaatacactaaagattatagagtggaatagtaattcaaaacagataaataaaagccttcctcctcctttaattcctgggggccgcttttttgcctggaccttcccgtttccagaccaaaaactttctgaggtcctgcgtttgaggattactttcagctgtaaaagaaatccagccacaatggcttcaccaaatagaggtttgtgttgctcacataccaagaagtcccaggtagtccatccacggctggtgaaactgctctcagaagtcatagaggactcaggtggtgccttcctccaccaccacagggctcttatcctcagcccatggcttcccgcctcagtgtcaagttggctgaagcagctccaagtaccaggtccgttactccaggtcagaaaaggagccgccttttaaaagcatcccaggaagccccacccagagacttctgcttacgtgccattggtcaaactaaggtcatgtggctgcacctatctgtagggtgtctgaggtggtaaggtttttgcgtggacactgttgcagcctcaaacagaattagaattctgatagtatgagtggaggggggagatactgaattaagcaaataactggtgtatcatccctaattccttaggcccagctcccactcccttcctgagctgctgagccagaaagccttgatggggttgaaaccatcagatggagcacagccgtagccaatctgggccgggccactgctgcactctgctttaaggaagagtactgcataccacagcagggaggtcatggttttccctggccacacgcctggagccactctgccttcatcctcctgacctctgcctgaagcccatgacctgacacaatcagggcagcagactgggaagggcactcctctctgtgctgggtgccctcagcagagctgcaaggggaggcaagttggactccagagccccttcccttcctgatcccagatcccacagagcagagcccagagacagtcaggggactgtgatcatcctatggacaccaagctgctaaagtctatgtataagagattgcactcattgcaaaggaccactaagcttcagcccaaataatgaagcactaatagtaaagtttcaggcaggcttagggagagaaagatgggaaaatctctcctgttccctaaatggaatattgtaggctgccctcctgagcccaaggacaggactacagttggagagactcgggggcaggagggttaagccttgattccaaaggccactttcctgccatgtctatttctagtcccaagttagcagatgacttgtaagtaagcaagtcagttaagttttctaggcttcatttgggcgacctctaaattatctagactctaactcagaaaaaagaaggaccaaagtctagagattgttcgagaaattctgatttaattgatctgagatgacatccagagatgatttgttagccttacaagtgccccagttgattctaataagcaatcagggttgaaagacctaaatccttgctcttcaatgtgtgatctgtggatcagcagcatcggcgtcttagaaatgcagcatcccagaccctgccccagacccactgaagcagatgtggtttgacagtacccaccagcccccagcaattcatatgcatcttaaagtctgggaagcctgttataggtgatgagactcaatgcaatctgtcctggtctgtcctgggctagcgcggtggctcacgtctgtaatctcggccatttgggaggccgaggcaggagcccaagagctcaagactaggcaaggcaacatagggagatcccatatctccaaaaaaaaaaaagccaggtacggtggcatgcacctgctgtcccagctactgggaaggctaacaagggaggatcacttgagcctgggaggttgaggctgcagtgagctgtgatcgtgccactgcactccagcctgggggacagagcaagaccctaccagaaaaaaaaaaaaaaacaaaatctgttctctttatgaagacaatgctcttggccaggagggtcttctagggggaatgagagggagaacaaccgagtgcacagcccttcagaagtgctatggggtttccattaacctctgccgcaggctaggggtggcaggagcttactgtgccacatcaggaagctgagcctgtggcagcatatctgcccctcctccctttcaccagttcatgctctgggcttctggggaaccaaatgatttcaccctgcaggccagggctgagcagaaagttccagaatgccctcaggcctgtgtctgcctctgtcccttttttgatctgactcccacgtgtagctttggggaaatcttgctaatatacgttcattcattatttaaaggttgctgctgttcttcaggaaggttaagcatgattaaaagatgggatttttccacagggcacagcagaaaagctagggctcccacatttttaagctgttttggccaagccttgttgcataattcaaagtctgtgatttacttagatttaattagccaaaggagcagcagctgcaggttcattagttagtatttattaagcgccctcagagggctttttaggctcttaagagtgaagtggaggatgggtttcggacttgcaaatttcttacacttaagtaggaggggattacagatagcttcaggaggtaggcatttttgttcctcaaagagagcaaaggggtggcatcaaaaggcctgagctcgtggggcaaatcctacaaagggccacgagtcagagagatgtcagtccctcacagggttatagtgacaattagtgagataacaaggtggaggctggtggtgaataagaagctacacagatgagaggtatcagccagagcagggaagggaagtgactgctaacctgaatttcaagaactgggagaggtggggaggtccggctcctgaatttgtgggcccagtgcaagaggacaatgcagtgtcccatcatgaattccacgacggtgacagcagagcattaagccatgtggagagcccccactgagagcagggccctgtgccactgccctggcggtggatgacggagaccccagggttaaggggcttttgtggtgcctctcaaatctcacccagagagtgactatccttggcctgtactccatcaacaggagggagggagggagcaggctctgtgcattttgcaggggcagggaccgttggagcaggccattggaggaaggagtctggtggccccagggcaagtggcccctgcatgccttccagctctgggcgcagagtctgcctgcagaggcgcctcttcacaagcaggtcacgctctaggcttccagctgctaatcacaggggctctccagcttgggtgcatttcctccctctgctcctggcttccgccccagtcccattcagctgatcattctccgctgggctagaaaatccaaaaatagaagaaagctacactttttacccccttgagcctcttgtatcaaatgacacagtcactttgcctcaaacttttcatcaaagcagcctttgtaaggtcctggggcagaaagcaggccttggaagacagccaccaggaagccatgcagaaagtgctgagcagggggacccttggtggaggaggtggggagggcagggtttcaggagcttccctctgccccagaaagagccagtgacagacacttgctaccatggggcagctcttctctgagcaccagctctagcttcaggtcttggaagtgcaagagcagcaaatagtgtggctgcacagaccacccattgccagggttcaacaaccagaccacagagctcaatcagtgattaaggagcaatgattgatcaatcaaataaacagaaggagtgtaagagacgatctgagaaaggctctgtgagctaaagcattctgtgacggcttcttgaaaaggaagctcacccttgccgaatacctaggatgtattgtaccctgtccaacactctcatgtcatctattttatcccatagccctccatgaaggagcactggtacgcactagattaatctgcccaggctgctctaacaaaataccacaaactgggtggcttcagcaacagatgctcatttgtccacagttctggaagttgaaagtccaagatcaaggtgttggcaggtttggtttcctctgaggcctctctcggcttgcagatggctgctgccttctcactgcatccccacgtggtcttcctctctgtgtgcatccctggtgtctctctgaatgtccaaatttcctcttccaaggacaccagtcagattggattaagccctcattttaacgccatgacttctttttttgatttcaatagtttttggggtacaggtggtttttgattacatggataagttctatagtggtgatctctgagattttggtgcacccatcacccgagcagtgtacactgtacccagtatgtagtctaaagcccctatctccagatgaggtcacattctgaggtttcgggggttaggacttcaacacttgaattttgaggggagataattcagcccatgacgcccactttgctgatgagaaatcagactccgagaggttcaggaattgcccaagcttgctcagccaggaggtaccagagaccaagtgtggcaaggagctgaaagatgattggaagaaaacaaagaaccgtgctgcgtctcattcatttaggtttgtgaacaaaggttccgagctggtttgataacatgggaagagaactgctactccatttcagatggcattgtgtggccccctgtatatctctctagatatgtgtagctggggtagtggctccagagtttttctgcttatgaatctacccttttattctaactgttcccgtgtttcttttttgtttgttttgttctgtttttttgagacagggtctcgctctgtcaccggtgctggagtgcagtggcgcaatctcggctcactgcagccttgccctcctgtgttcccacacttccctcaccaagcgctaaggaggaaaatgtctttgagaggggacagatgtaaggcctcactcactggcccacctgacccacacacctgccatttcatgagtggcagcagatctatactcaaaggcctcggtaactccctctggatcccaccccatgtcctctcctaggtcccctaagacgggagagtcagtctgtaactggcagcctggggtcttccctcttcaatctgctatgcctggctctttttctgaagaccaggttggtatgtccactctgagacaggagtaggtataagaaagaagagggaggtggttgggtaagagagaaaccctatacagttcactcaggctgactttcacttctgagcaatctccatagcctcacatacataaagcccataatatttgagctagcctgagtgggttccaagaaaacaatgattggaagactctggaagcacagtagttggtagaaagctcacctgctctcaggtatcaggccaacttcaaaagaactccagatgactgcccttaagcaaactctatgcactgtgggagaatccttgttctcaaaacagatcagttaggaaactgagcatggtggctcatgcctgtaatcccagtactttgggaggccaaggcgggcagatcacctgagatcaggagttcaagaccagcctgaccaacatggcaaaacctcatctctactaaaagtacaaaaattggcctggcatggtggcatgcgcctgtaatcccagctactcgggaggctgaggcaggagaattgtttgaacccagtaggtggaggttgcagtgagccgagatcgtgccactgcactccagcctgggtgacagagcaagactccatctcaaaaacaaaaacaaacaaacaaaaacagatcaattagggccagggtcagaagctcagatgccaggagggcccaggtgggccagataaaagtgggaagctggccaggcatagctgactggaaaggaagaacccgtaaagcaggaagcctctactcctttttccctccttcccatcttcaccatgtggagatacatgccccatgtccaactcaagggcagccagaaatccagacttttatgtgatacctgctgatttttaaatgttggttcaattttctttagccactatacagacctaacaaaagtccacggggccaacagctcacaatctctgaactcgaagtgttatttcctttatgataaagtctctgtttcactcagagacacgctgggggatttcgttaaacagaagacactcctagtacaaaaatagaatgtgattcactctctaacaatgtttaagcacagaagccgcagtaagggatgcttcttcccttcacaaattgcctcaccttgaggtgtttcaagagacagatctcttaatgcatttcaaatcaggttagagtggcaaaaatctaattttcatacaacttcttgaagaaagatggcaatttcactaaagcctggatcaagattaaggaaggcatgaaacagaagcctgggagcaggaaaatgaggcgggagagggtggcggggtggagggtgaaaagaaggtgaagctgcatgcccaggctcagtgtttgcaaagaggctggcaaccgcggtgtgaagccagtcagacaaagagcagtggggcctggggacccgagtgagcagagaggggaggagaaggagggagtatcattggtttccatggtgacaaaggaacagggatgggaagaaagagtgagggggatgtcagagaagagctatgttgtgctgctgcctataacaaagtcttctttacccggacacccttgtctatgatttcttggcccctctgatacttcccccatcctgattctctgctcattcctggcatgaataaattactatgaaattaaggacatttagatcctaaacatggatgtgatggatgaatgggtacctacttactgagcctctgtctccaaaaggcctcttggattcaaaatattttctccaacgtgcttccgtaaagcccatgat

SEQ ID NO: 249 - DNA, 680 bp, Homo sapiens
gcagcgttctggttttctggatggcagcagaggacagggagatgatggaagcccggggtgcgggagaaagttgcccgaccttccccaagatggtgcctggtgactccaagtctgaagggaagccaagggcttatctggaggcagagtcccagaagccagactcctcctatgactacttggaagagatggaagcttgtgaggacggaggctgccaagggccgcttaaatcgctgtcccccaagtcctgccgtgctaccaaaggccaggctggcgacggacccaaacccgcagagctgcccccgacccctgggactgagcgcaatcccgagatggagctggagaaggtgcgcatggagttcgagctcacgcggctcaagtacctgcatgagaagaaccagcggcagcggcagcacgaggtggtgatggagcagctgcagcgggagcggcagcacgaggtggtgatggagcagctgcagcaagaggcggcgccccgcctgttttcaggaggcctccagaacttcctgctgccccagaaccagtttgccatgttcctgtactgcttcatcttcattcacatcatctatgtcaccaaggagatggtcttctttctcttcgccaagcactacctattctgcattgcagccattttgctctgtttgattaaaactttctggtcatac

SEQ ID NO: 250 - protein, 218 aa, Homo sapiens
MAAEDREMMERAGESCPTFPKMVPGDSKSEGKPRAYLEAESQKPDSSYDYLEEMEACEDGGCQGPLKSLSPKSCRATKGQAGDGPKPAELPPTPGTERNPEMELEKVRMEFELTRLKYLHEKNQRQRQHEVVMEQLQRERQHEVVMEQLQQEAAPRLFSGGLQNFLLPQNQFAMFLYCFIFIHIIYVTKEMVFFLFAKHYLFCIAAILLCLIKTFWSY

SEQ ID NO: 251 - DNA, 45764 bp, Mus musculus
  misc_feature (1)...(45764): n = A,T,C or G
gtgcggacattacaagtgtatacaaccatggccagcagcctgtcaacagactatttgtaatgttgctacctttaaatatcgatgtcaaagaatctgtttggctactttcttttgattttctaagaagaagaggtagataggaagaagaaggaggaggggggaggaggaggaggaagaagaagaagaggaggaggagaaagagaagaaggagaggagaggagaggagaggagaggagaggaggaggaaggaggaggaggaggacaaaaacaagaagaagaagaagaagaagaagagaagaagaagaagaagaagaacaagaagaagaagaagaagaagaagaagannnnnnnnnnnnnnnnnnnnccttcaaattgagcctcccaagtgctgggactataggtgtgcaccatttatctcttaagtagcaataaagtgggggaaggggggagatggctcagcagttaagagcatggactgctcttccaaaggtcctgagttcaagtccatctgtaatgagatctgacctctcttctggggtgtctgaagacagctacaatgtgcttacatataataaataaataaatctttgaagaaggaggaggaggagaaaaaggagaagaagaagaagaagaagaagaagaagaagaagaagaagaagaagaagaagaagaagaagaagaagaagaagaagaagaagaagaagaaaagagaataggaggaggaggatagaaaaggaaaaagacatttctttcttttgatccacaaatggcttcactttcaataccatcttctagagtaccggggttacggtatgaaccaccatactcagctagatttctttcatttatttatttttacacttgcttatttgtttggttgtgtagggtagagggcctaaaaccatagcacacctgtgcaggtcacaggacatcctgggggagtcattctctccttccagggtgtgagtcctggggatcccctctactagctgagtcatctctactacccaagtagttttcttgtaagataagcatatttgagccacacatcctcgccaacatctgctgtcacctgagttttgatcttagccattctgactggagtgaagtggaatctcagtgttgttttgatttgcatttccctgatgattaaggatgttgaacacacacatttgtaaacccagcacacaggaggctcattgagacccttacttaagcaaacaaataaagacaccctccctaataacctggcgtagtggctcacacctttaatcccaggtcttgggtagctgagacaagtgtatctctgagagttcaaggccagtctggtctatttagtgagtctctggacagccaagattaaatagtgagatcatatctcaaaatactactgctactgctgctactactactactactactactactactactactactactactactaaaataataataaatatcccaaacaacaaaccccgcatttcagagtattagtatacagaagatgctaaggtaacttatttaggtcttgtcaaaacaacagtccaggcaggccaggtgatagttagaggaaagaaagatgaagctgtgggaaaatccaggaagggacaggccactacatagagtcaacagtcaaagagggctgctgagaaactttcaagaaggagcccagaagaatgggagaagtgtccgatctgccttccagctgagggaaagcatgggaaacattgcagaattgggaccacaggaggatccaggcaagctaagcactggaggctgcttgtcgaggggatagactcgtgaccttggaaataaaacctttaattattcgtaggtgtgtgtacatgtgggcatgcatgagaatgtgactgtaggtgactgcagaggtcaaaggcatttgatgctctggggctggagtttcaggagctgtgcgtgatctgacatcggtgctgggatccaacctcaagccctctgcaagagaagcaagtgcccctaaccactgaggcatctcttcggccccagcctcacttgttattcagcatcatcagggagcaagtgtgaggtgaggagcatagtgagggatgctgggctttaaatgtagattgctgctgtgtaggtacacacaatgcacactggtcaccaacacttgagaggtcgaagcaagaggatcaagtcccaggccagcctgggctgcacaggagactctagattccctaaccccaccatacagggaaggggttgggatctagtaattgttgtgttttgtaaaaaagagagaaaaggaagccagggatatgtttggtagaggcatggtatggtgaagtggagggaggggtgcctctacgaccccattctgtgacatcccttccctctgaggtaccagacacagactggtatagtataaaatagagtttattcagggcatggggaggggagctgagggagtagaggcagagagagagagagagagagagagagagagagagagagagagagagagggagagagagagagagagagagagagagagagagagagagagagagaatgagaatagaggagtagaggccagccatgaacatgtggagggagaatgaggaggggaatggagagagaagggacagagagagtaagagagtaatagaggaagaggcaagcagccccttttatagtgagtcaggcacacctggctattgccaggtaactgtggggcggagcctagaagaactgctatcagtaattacaccctgagagagagagacacatattaaatgacaggaaagcagtgcctaattctctcaggatgatgcttttagacttgtcaggcatcaaatcccaaagaggatcccctaactaccagaaagcattgcactaggtgtcaggtatgtcagggtacacctgtaatctggcacctggtaagctgaggcaggaggatggctgtgaattctagaccagactggcatagaacacagcctggccctgtcttttaaaacaaaaacagtcaaataacgaaactcacaagaaagtgacgatcctgggctcagctgcagaccctgtgctaggtatgttacatgcatggtccctgcccttggatatttgtacaaggccaagtctgagacctccgagtcagcacagaatgcactgtatgttgaattctcagcacaaaggagacttacataccctggaagatacaaacagaggcagtgggatgggggctgcctctagactgggcaaaaacaacagtaggtgtctctgcagaagcaatttttaaggaaaaaaagggggaagtctgtgttagctaagtcttggttggatatattagtctgtgtagtcaaataatgcactttgattgctggacttttgtggtcagcctcaggaatgagttaggcataaggaagtggccaaataagggaatggactttggtggctctctttaggagtgtattctaatggttcaataaggaagagggaattggggagggcaagacctatcagtgccatgttagccatgctcaggcttgttagagcctatgactggcatccttgggtctccaccacaagctcctgatttacatcaggcttgggactggaactttggaccctcttttgctaagctgcagccataggaccctcttctctatgctcagcatctggcttgggtttctttctaagaaaaacatgcttcacttttttccaagccactgatcaactgcctcaggaatgtttagacttgttgggctgcctggagctgggaaggggctcttgttatggaaaggtactgatgcctctgctccactggctgcacctcttcctcctgtcctagaccccagatgcctgtcgtgtaccagtgcccgtgaaggctgcatttgtcccatctgttgtggctcagtgggtgtttccattaagggttcagagcccaggtggaggaggcttagctattatagccacaatagcttttgtgggatcccatatgacttgcaggtcatattcagaatttttttttaattatcagaggtgagcactgatctggagatgtccatgttgaggctctctgggctcagagtgagttgctctggggagcagaggcagacctggatggagagagggctcagctgtgtgaagtcaccatgcagagcatagccaaaccccaaggagcctcattgctgactctcagcaatggctcacattaaagtgaggagacaagacctttgtgccctgtgtgggcctctgcttgggttggtcacccacggtgtcacagttgggtggagctaagttaacctttgaatgctgggaagatgaagattggaactggacacctgtcaggggccttcttggtgcatcttagcgtgacaaagagtgtcatgtggcaagatgaggtcagcatactgttcagggcagttcctcttctgaggaagctggcaacccagcttgaagatcccaccacagtacctcctctaaccttactttctccacctctgagtgccagcaagctaagatctggtgaccagcacaggaattccgaaagacatcatctggagacgtggtgtgacttcggttattccaagggagaactattgggaaccacaggctgctggttgacccatacgctgtcctattgggtagatctggatggtgctccagcatccacacaggctgactgcaccaagtcagagcacactgggctgtgcttgagctgttgtgtgaaatagttgttggtgtttgtgtgtttatttgctatctatctatctatctatctatctatctatctatctatctatctatcatctatctgtctgtctgtctgtccatccgtccaccatccatccatccatccatccatccgtccgtccgtccgtccgtccgtccgtctgtctgtctgtctgtctgtctatctatcctgtctctcctccctttttcttcttccctcttcctttttctttcttctttcctccctcccttcttttttcttgtttgcttttctttcttttcttttctaaacatgtgtgtttgtacgtgtggcagagatcattgagtgtcattcctcaggagttatctaccttcatttatgagatagtgtctcttgctggaatcttggtctcactgataaggctgggtagctagccagtgtgctccagggaccgtctatctctgtctcccctgggctgggacttaggttcttaacaccatgcccaggtttgttgttgttgttgttgatgatattctctctctctctctctctctctctctctctctctctctctctcctctctcatgtgtgtgtctgtgtgtcacatgtgcatgcagattcaagagtagcatctgtctatcttattattttagcaaggtctctcattgaacctggaggtcatgaattagctatactgaccgaccagtgagttctggagacctgcctgtacccctgcccaagtactgtgaataagacatataagaccttgctttttatgtgggtcctggggatccaaactcaggccttagctcttacagggcatgttactgaccgagccatctcactagccttggtcttctctattttgtttgcttgcttgtttgtttattttaaaaatatttgacagaagcggcagcgattttttctctcatttaatatgctcatgaatgtgtagtcttctcagctgctgcctttcagtctgcctcattatcatttgaaattcaaagtccagagtttgggctcagtcttgatagaactcatcccatgtttttggacaagttgtagagatgcgtgtgtataatggcagtgtcttccagagtggtttcactgctctgtaaattgcagctctacaccagttcattcctgtctctgccagcctctggcagccataagcccccttttgcttttcctcaatgacatgaagttggaactataagagtcgggttgttatctttcgtgcagaggagttgtggcgagtagttttgtttgcttttgtcttgcagttctagggacagaactcggggcttccctcaggttgaacaactgctctatataccctatccctgattgtaccttgtgttatacaatcccagactggccttgaacttcactcttcctgctgccactcaaagccaatattacaggattcttctaccaagcttgaatcttagttttgttgctattgctttgtgcattcgagacagagtctcactacaaagcctaggttgccctcaaattcatgatcctcctgccccaggttcttgaacagctgggatttcagacctgtatgaccacacccagcagtttagactgctgtgtgaagcccctcttagggaaaaagaggttctgagctcctccatgcccttttagccaacaacattttctcacttgttaaaggctctggaattcttgtaaaatgtcacttgaaagccactgtcctactacaactctcttatttaacagatgacagccctagaaagtggagacaggaaggggctttcccagaggcacacaccctggcagagtgactcgtattaatcctgtgacactggactcttgtgaacttagctgcccccatgtctggactaccccggcttcttctgtcctacctccaccatggaaaagccctgtggcttgctgccagggaccaaagccaaatctatttccactttttctaatgactgtgtcttcacatagactggctggctgctctgagctcgggagagctagggagctgggacagaaataccaaggtggtcgagggtactgtgacacagagaacaagcttggtaacccggctgaggacaaccataaggtgactgcatctcaaatcccttaagtaccttcctctagtgagttggggtgggagcccagcatcacacaggcaaagcagttctggtattccctgtgccaccctgtgtcctcagctagacccctcccagcttcaagcatctcactcctactgtcctgtcccagtgaccctatatcctgagccatctcctaaagcaggccaagtcataaggacctcagacagccttcaaggcaagaggtagaaaccaggagctgaagaaaccataactatgagaagtactggccaggaaaaacacacacacacacacacacacacacacacacacacacacacacacacacatacacacacacacgaatacactcattagcttgggagacaaaaccactaatatcatggatctgattcaagccccagttttgaagccacacttcagcctgccattcacagctgtaacctagggctaaacaaaagcagtatttccagacgttcctaatgagacgcttctcatactcaggtcttccaatcttcctgctttcaaaggaaatgcacagacctctcattgtcttcagcactgcttttcatggtggggtgtgtgtgtgtgtgtgtgtgtgtgtgtgtgtgtgtgtgtgtgtgtgtgtgtgtgcatgagcacacacagaggatggaaccaaagatctctcacatgctaggcaagatcactaccattgagctacatatgccccagcccagtctctcagtattggttacactccttagttccattctgtctcttgtgatcacctgaagcccctgaaggaagtgaaagtcttcactgagactagcagtttctgccggcctcctctgtgcatgagcctgagctgcctactctgggagacaaaaggcctgatagtcacttcttcctttgtctatggcacttgtctcctcctgcccaggcccaagtcttcatcaccttccatgagctgttggaccaggacctccctccccactgctgtattttataaaaagaaagccaaggatatgtttgatagaacatggtatggtaaggtgggaagggatgcctctgcggacccatgccgaggcagcccttccctctagtacagaatagagtttatttagggggagggagggagagagagagagagagggagagggagagannnnnnnnnnnnnnnnnnnngagagagagagagagagagagagagagagagagagaagagagggagtagaggctggctaaggaaacatggagggaggggtaatggggagaggggagaaagggagaaaggttcagggagagaaagggcagagagtaagagagtaagagagcaaggagggggtgaaatgtcccttttattgtaagccaggcatacctggctgttgccaggtaactgtggagtggagcctagaaggaatgctaacatccccggctttgacaacttacagggtggcaaaaacatcagattgttcatttaaaacaaactctactggggctggagagatgtcttgggtgttaattttgcttgttgctcctccagagggccagagtgcagttcctggcatacacattaaactgctcacaactgcctgaaactccagctatgggggttacctcaccctcttctgatatgtgtgggtacttcactcacacacgcatgcacgcacacacacacacacacacacacacacacacactaccatcctcatctgctgagacacagcagcgccagcaccttggagctacctgccaacactttgacttttatgctgtcattttgtggacgtcttggaacctttaaatcttgaattcattgagcacttccattcacagcatgatcattaactgaaacaaaagtaacctcgcaaaacctaaaccctctactgtagtgtgtagtggggacagaactgtccccaaaggactaatggtggaaagtgccagagatgtcttcccaaatgggtgtggaagcctcggggaaggtcagtttgcagagggttttctaaaaacactgcccattcacagtgtgaatgggctcacacacacacaacatgcacagactttttctcagaagaggaaactgccttgtcacctgtgtcttcatttcttaaatgtcagccgcagaggatgtggccctgccaccattaccccaatctggttcttcgtctgagagacaggaacataattcgctaagggaagctggagggtgccacatgagaaactggacatccaattccaggaacttgggctgtctgggagttctgactagacattgtccctgtgtgtagggagagcctggtacgtgccgcaggcttgggtggggacagcgtgttggttacttacctcattgctgtgaggaagtactcaacaaaagcagcttaaggaagcactgtttctggcacagagtctgaaagtccaggccattgtgtaaggaaggcctggtgacaggggtgtgaggcagatggtggcactgcatctgctctcagaacgcagagaaagatgaatgctggtgcttagctcatattcaggatgagtcttcccacctcaatcaaagtgatctagaaactccctcataggcatggctacagggtggggaagctcagtggtcagggtctttgctatccccatatggcttgagtaccatgggcagctaaagaggacatttcttcctatgagggtgagcaaggccatctttgcctcccatcccttttggaaccactggcagaggagaaggtctatttgagaggcttatgaatcaactccaaagcaagtggggatataggaagcatggccctggaggcactgggaaatcccaagccaagacctgaggagacctgggcatgagtggaagtgggtgcattctggtgagaatatcccatctgggagcgaagagacccttccctgaaatctcccccagaacgatgagctttctgtgactggaggcttgtatgtgactatcacatggcacagagccacccttgacctttcaaggttccacaggaacattccctctccatgctccagaaaacggatacttaaagaggataagtcactcgccttgggcctcacagatgggactccaactcctctctagtgtctggaaccctgttgttcatattcttaggctcctcccacccccagccctcagcagcagtgcaagttcactctctgcctttgcctaccataatccgatgacatatctgagtgtatctctcctcccagaccatagtctgtgtgccaccatggatctgggatctccagagggcagctacctggaactccttaacagtgatgccgaccccctacatctctaccacctctatgaccagatggacctggctggggaggaggagatcgaactcagctcaggtgggtctcattccccaggacctctcctggccttctcaggacttctgcaggcaggagacagttagcaagctggagaaaaagcactggctgcctgtcagaaccatggacagctccccgacttcgcttattgcgctgaccctcatttggagccggtctccctccttcctcactgcccctcctcccagacacccaggcttcatcctactggctttccccttgcagagccagacacagataccatcaactgcgaccagttcagcaagctgttgcaggacatggaactggatgaagagacccgggaggcctatgccaacattggtaaggaggtcgcagaggccagagaaaagaccaagaagagtctttttcactaatgtcactaggtccttcccaccaaaattacagctagggtcagcaactagggctagaagggagggtacttagnnnnnnnnnnnnnnnnnnnnaaaaaaggaggaagggggaggaggaggaggaggagcaggaggaggaggaggaagggaaagactaaagggatgcagaccctttccctgatggctaccaagccaatcgtgtccttttacagtacttcccttactttctttctgtttatgcgttttgcttgttgggttagttttattttgcttctgagacaaggtcttttgtagcccaggctgttctgggactcactatgtattccagtccagtctcaaactcatggcaatgctccagcctcggctgtggaaccacagcacgcaccacatccagctctacacttccatttccatttttttctgctcctcttttacacaaagcccacaccacacacccttccccagcacctaagccaatgagccgccatgcatcagtcgacactggcaacgtgttggtttttacacccgtaagaccacactgacgccttggagcagccgatgaagtctgtgacgtgagaatcttctattcacagaggaggaaattaaggtggagagagatgaagtggcctcaaggctgagtcagatggcagatctgaaatcccatgccaaggctccacacttccaagcactgacttaaatacaaaaaggaagtgtctgaaattgagcagtttgacaaggcatgtccatcaaagtagcttcatggggtaacagcgtttgccaccaagcctgatgagctgaatttaagccccaggagtcaggtagtgggaagataggacagactctgccagttgtcctacaacatacttctaacgttgctgcccacctctggctaacacccactatttgttctcttcactgagatgaggaaacaggaaccagaaacattaagcagccagcccaaggaggtccagcagagggagctagtggagaatagaggcagaatttgaactcagcccagtggcagacattttcatgggcacatgctttccttatctaataagacagaaaacacatgaaaagctatgtctgtttgctcattcattcaaaacatactcagtaacctttataaagaccctactgtgcaccagcccagaaggtccttagcctgcggctagacacacagcaagatttcaggagatcctttgtttggttggttttggtttttggttttaagacaggatctctctacatcaccctggctgtcctggaactttgtagaccaggctggcctcgaactaagatcttctctgaggcacgcaccaccgccgccttccgtgggaacctttttgactgaccgtgtgcttctttatctggcagcggaactggatcagtacgtgttccaggatacccagctcgagggcctgagcaaggacctcttcagtaagtcgggagaagttgatctaggctcagtctttagtccttcctgacctgaagaaatggctgacagccacacctcctcatggtggctttcccggggattctgtgattgtgatgtgagtctctggtgtttctccaaagtagagcacattggagcagaggaaggctttggtgagaacatagagatccctgtagaagcaggacagaagcctcagaagagacgtgagtgagcccctccctgacccatcctgtcctttctcagatccggtccttccttccgtctgcagcctgctgtgtcccacttgtctccatttagtcctatctgtctccccaccacatccccatgccacacagctctagagcccagggggtggggatctatgtgggatgctttgattcctgttcctcaatgactgagtcctgcttccctttgggtctctgaggaatatctctttaagcaatgggtaaggcctcaggcaggactgggatggaatcctgaatctgctgttcataggctgtgttactgtgactagggacctctacacccccctgccctgtctcctgcctccttagtctgtcctctctgggtggccattgatgctttcccatgcaggttagggcacccctgccttgctgatcctctagttgtcataagatacatctgagaggcctgtgtggcctgtccgacctcctcccctggctcatcacagagggacgatgctctggcagcctaccccactgttcctgagatgttttcctctcacccttcaaagccattagctcactttgaccaggaaaccctccctgaccacacatccacataaagtcactgtcttatttatgcttatttctctctttttttttaatgtatgtattttatatctgtggatgctttgcctgcatgtgtgtctgtgtactacatgagtggtgcctgcagaggccagaagagagcaacagatccccagagacaagaattacagattgttgtgagccatcatgtgggtcctgggaattgaactcaggtcttgtgggaaagcagatggtactcttaaccactgagccatctctcctgtcctttttatatgtttgtgtgtgtgtgtgtgtgtgtgtgtgtggtgtgtatgtgtgtgtgtctcccaggccttttgcatgccaggcaaacattttacattaaactgcatccccaagccctgtaatatttatttactggtggtcatgggattctggcatggcatgtgctataaacatctaaagccctaagaataaacaatggcagcatttgcatcttctccccttcctggccttagcatctctccctgaaggcagtttgtgtccaacactctctttcgagccttgttggaatgctccactcaattgttctacccctacccccccacacacacacatgcacactcacacacactcacacacacacacatacctatgcatacacataaggcatagacacgtgtgcatgtgcatatacacacacacacatatgcacatatatacaagtacacacacatgcacacactattaccctctgccatgtgtgggaggtatttctagattgctgatggaaaacacaaggctctgtctgcagatttccccgtcttctcctctctcccttcttctcttcctccctttttgcagatttctttcctttaattgttgtgtgtacggacacacacatactatggtgaatatgtcaatatcagacagctctgggattagttctcttccacctttacatggttctgggggttggctttcccccttctctccctcttcccttcttccctctcttctttccttccctgcacgcagcccctcccctcggttgatattgggatctatttgccttgagatgctccatccattggtagattccttggtccatctacccatctcctttgggtgccttgccagtaaattacagcctaggaatccctttgctgcctgcccctccccagcatgctggctctttcacatctgactcaagcagcatccttgggtggctgccccagttggctccatgagcctcttgctgagggacatggttttcaccactaacctgtggagataatctctgcttcccactgttgtctgcaagtggacatgtgcgtgcaaaggtataggatccacagaggaagtatcaaggctctctggcaggctgtgaggacaacctgagtagagcccagagcagttggctctaatagtttttcagttttagcctcacctgatctgtgactctgcctctcccttactctcacctacctgccaatatgctttatagctaagacatgggctccagccctggcactggccagcaccctgaggtataggggagaagtgggacacagtttctcaattcctcaggcaaggtcacagagcctgctgggacccaagaaatctctatggctgggtacatcccaacccagggccactgatcttagggttctctttgcaggcttcccggaagagcatgctatggactcaaagcacaggaagctaggtgagatgggcaggtggttcagaggggtcccatttaggggagcacagcccccctcaaatacagcacaagccagcactgaacaccagggatcagggttggagtagttcagaggtagagtgtgtgactactgtgaacgaggccctcgttgaattctagcatcataggagtaggaggaaaggagggaggaaggaaaggggaagagaaaagaatagaggataaaacatccccactgagggaatctactgctgtccctcccacttgtcgcccctccatgtctctgtcagtcacaccactaggtgctagggacaccactataggcaagacaggctcagctgctgctcctggagaaataagtgccccttgagagggaattggtctttcaccccacatcactaaacagaagatgggtgctgtgaacaatcccccctcactgcctctgtctcctgcagtgcccacctctaggacctcactgaactatttggatctccccactgggcacatccagatcttcaccactctgccccagggactctggcaaatctcaggggctggcacaggtctctccagtgtcctaatctaccacggtgagtgtgggagcccagcattaaagctgactgcctctccttcctccctaacccctgaccttgttctttcccactgccgacattggcaattgtgacatagcacctggtcataaatcctctctccccaaacctgtctctgtctttgtttctcccaaaaaacaaagtccgggagtgtctctaaggtggtctgcctatgtgagcagtgtttctagggtggtctgcctatgtgagcagtgtctctagggtgatctgcctatgtaatcagtgtctctaaggtggtctgcctatgtgagcagtgtctctaaggtggtctgcctatgtgagcagtgtttctagggtggtctgcctatgtgagcagtgtctcttaggtggtctgcctatgtgagcagtgtctctagggtgatctgcctatgtgatcagtcttgtagccttctctgtgtgattacttcctctcccctcagtttttcttcattaaaaatattttattttattagtatttgtgcacacacacatcagagtgcatggctgcaaggcttgaagaagccagaggcgacagatctctctggagtgggagatacaggctgttgtgagcagcctggtgtggatgccgggagcccgatcaggatcactgggaagtagtatcatgcatgctcctactcactgtgccacctctgcagccctcaaacacaaagcaaagcaaacaatcaaaacccctcattttatttttaaactctgacattgatcatactcactattcagccaaacaataagagactggagacttgagtgtcccccccccccttgccagcgtgctgggatgaggtttgctgtgcatctgtgcacagctctctctaatttgcctttttttttctgaccaattaaatgttgatccaccatagaaaggctgccaataagccccgggaaggcatggctgggctttaagggacgaggtggggatgctcaagccgatagcctccttagacaagggcttcccagaagcaagggggcaactgctaacatgtagggaaatgagtgctgaccatactgtgggagtgcgggggagcagatgctctgagcaccctgtgagcatactgcgtccacttcacgagggacaggatgcaactcagtcttctctccccaaactcagcaagtgctcacctcgagagcaataagagaccatttatcccaaagccagatatgagtgaccaccgctgggaacacagagtcggggtgcctcaaatgccacattccaacatggaaacagttaaatgaatgttttatagagacagaacaagagagttgtaagtcaaagtatcttgcaaatacattggtgcaaacctcagcattgcaacaacgagggatgcctctgctagcgtccacacctgctatctgatggcattcttagcctttgggttggtggaaatagcatctggtacattctaaaaaggatttgtacctaaagtcttaaggatgctagtttaaacacagaggtgggcaattaacgtttgtggggtgggtgctaaagactacccaagacaatttggctctgaacctgcaaacttccagctctccacaggcacagaagtcctaactagtcggtcagcatttaacacagatgtagtgctctccccactccaggagaaaggcatttcacactctaccatttgattggagcagagatggccccagcacacttctggatgtgttcctagtggatatatcctccttatctttggtgtaggtgagatgccccaggtcaaccaagtgctcccttcaagcagcctcagtatccccagtctccccgagtccccagaccggcctggctccaccagccccttcacaccatctgcagctgacctgcccagcatgcccgaacctgcgctgacctcccgtgtaaatgagacaggtgaggcctggggcactgaaagaggcgttggaaacaggccttggggaaggatatttatcagacagtcagagttgcctgaggagatgggcaagtcagcccatgggtgacggatcatgagggagggtgtgtgaggactggggcagagagtgtgactgagggtcggatgacagctgggacacatatgtccatccaagcagaaccacaagccacaagcctcctgttgatccttggggtgtgaaagcatactccactgaaactggaaacttatagaacatgtgtttgaatgttgcttttctttgtctggagacagggtcttgctatatagccctaactgacctgcaattcaatatatacctattagattgattgtaaacttgcagaaattctatctaatcccctgagagctaggattatacatactgcaatgtctggcttaccataatctttaaagcattgatttaaattttttcttaaactggagatatcagatacagtcttgggcagccttcttgtaccctgatcttggagctcagacatgtggtcctgccctcagcatgccctaccactgggaggagtacatgggcactccccagactctaacttgacactgacttctccatcctcagaggacacatctccctccccatgccaagagggtcccgagtcttccatcaagcttccaaaatggccaggtgagtgacagtaggccctctgtcctggagacctgacatgaaagttcaaagcacttcattcattcagttcctggtcagttccttgttgtgggctcacttgctcattcatccattctttaacccattcgtgtatcacccagttgatttccccattgcttaacatctgttctgccattggagcagtagtacacaggtgtaagtctctctccctgggaggcactgtggatgaaggaggttaagtatagagcccagaacaatggaggatggtcagctattaaagaatagctaacccccaggatgtcccttctggagtgcagccccaggctttgtactgtagactccccagtcccagggtcacctccatttcacagatgaactagcctgaggtatagcagggcaccacacagatgggttcccaggtctcaaccttttaggtttttggtttttggtgttgctgctgacaccgtttgtttgtttgtttgtttgtttgttttgagacagactctcattatttggctcacaccattgaactgactctgtaacttaggctggcctcaaactcacatccctattgtctcagcctcttgagtactaagataataggtatgcaacactgtatccactgccttcaccttccctccctcccttgtttctccctttacttatttctttcttctgttttctttctttctaacttactatgtagctgaggaaaacttctgatcttcctgcctctacctcccaaatcctgggattacaggcatgtaccaccacattcctggttatgaaacgcagggtgacatacatattaggcaagcactctgtcaggaggtacaacctcaccagccccactgtattttttttttaaggctttaaatcatgtttgtttgtttagtgtgtttagtgtgtgtgtgtgtgtgtgtgtgtatttcaggtttcatatatgaaaggaaacatatgatatatgtctttctaagcctggttcatctcacttaacatgttgaatccacaaataacaactcccctctcaaaacccatagggatgagtgagtaaccgaagggttaaggcaggtcccagggggctgggaagcagttccgtggcagatcatgggctctggttttatccactcctctgggagagcaggagggtatggctgaataagtgagctggcaatgggcagctgtgagctatggaaaaactcttgaggggggcagctctggccacctcaccttccccaacccctactccactaacactctgactcaccctggcttttgtagaggctgtggagcgattccagcactccctacaggacaaatacaaggcattgccccagagcccaaggggtcctctggtggccgtggagctggtacgggccaggctggaaagaggcagcaacaagagccaggaaagggagctggccactcccgactggacagagcgccagctagcccacggtggtctggcagaggtacttcaggttgtcagtgactgcaggcgaccaggagagacacaggtggtcgctgtgctgggcaaggctggccagggaaagagccactgggccaggacagtgagtcacacctgggcatgtggccagttgctacaatatgactttgtcttctatgtcccctgtcattgcttggatcgtcccggggacacctaccacctgcgggatctgctctgtcccccgagcctgcagccactggccatggatgacgaggtccttgattatatcgtgaggcagccagaccgtgttctgctcatcctagatgctttcgaggagctagaggcccaagatggcctcctgcacggaccctgtggatctctgtccccagagccctgctccctccgaggactgctggctgggatcttccagcggaagctactgcgaggctgcacactgctcctcacagcccggccccggggccgcctggctcagagcctgagcaaggcagatgccatctttgaggtgcccagcttctctaccaagcaggccaagacttacatgaggcactactttgagaactcagggacagcggggaaccaagacaaggccctgggcctcctggagggccagcctcttctctgcagctatagtcacagccctgttgtgtgcagggctgtgtgccagctctccaaggccctgctagaacagggcacagaggcccagctaccttgtacacttacaggactctatgtcagcctgctaggtcctgcagctcagaacagtcctcccggagccttagtcgagctggccaagctggcctgggagctgggacgaagacaccaaagcaccttgcaagaaacccggttttcatccgtggaggtgaaaacctgggcagtgacccaaggcttgatgcagcagaccctggagaccacggaggctcaactggccttctccagttttctgctacagtgtttcctgggtgctgtgtggctggcacagtgcaatgaaatcaaagacaaggagctgccacagtacctggccttgactccgaggaagaagagaccctatgacaactggctggagggtgtaccacgctttctggctggattagttttccagcctcgagcccactgcctgggagctctggtggagcctgcagtggctgcagtggcggataggaaacagaaggttcttaccaggtacctgaagcgcctgaagctggggacactccgggcagggaggctgctggagctgctccactgtgcccacgagacacagcaacctgggatatgggagcatgttgcacaccagctccctggccacctctccttcctgggcacccggctcacacccccagatgtgtatgtgctgggcagggccttggagacagccagccaggacttctccttggaccttcgtcagactggcgttgagccttctggactgggaaacctcgtgggactcagctgtgtcaccagtttcaggtgtgggcagggcacagggcaggcatagactgtaactctggggacccctattccatgggtacagcattagatggtacagaataccccccccccattataagatgacaatactgagggccagagaaaggtaaccattgccactagccatgcagcctgtgggggagagtgtcattcttctaaccaatatttgaatacctgtggtgtgccaggcactggaacacatctagaatcgcagcctagcctgaattcaggttggtttcatccttcgatcaccagcgtgtgccaccattttcccaggctcagagacacaaccccccttagcttctctgcctccagtcttttctgtttcactgctctttgaattcaggcagcagagccatcttcccagaatgtgaatctggtcagattccagtgctgcttgcagccctgcaaggactccctgtgcctctcgggatggggggtctaagttcttccgttcagctcagtcaagtccatgttgcagcatgctggagcacagggtcatctccagaacagttcctcccacatccctgacactcacgttagaaggcctgccacagttgtgcccagaatttagcactaagcttcctggcagccagagaaaaagtgaaccagtaagggctgatgtggtcgtggaaggaggaggtcaagctaagaaaaggatcttacgaggtgggaggtccctttgcagagccccacctgcccttgtaatctcgccttggtgctgtgcctgggtctgaggccttccctccacagggcctccttgagtgatacaatggcattatgggagtcccttcagcagcagggagaagcccagctactccaggcggcagaggagaagttcaccattgagccatttaaagccaaatccccaaaggatgtggaagacctggatcgtctcgtgcagacccagaggtgaggaggcaaggggtcagagttaggtccagactgtgcaggcaagctatatatgtcacatgcacatcctagctacagagctgcccaatagtcttacttggcatgcccacacaggccctccactgcagtcccacccagccagggactccggttttgccctttgcccattctaagcctgacaccttgtatcagtctcttcacggctgaagccatggagatataacctgctgggggctaacaaggagaccttctgcacctactaactggtgggaccctcctagccccccaggcagccacagacccagtgccagcaccatttcaaccgtaacagagccaaggtgcagaggacaggacacaaggacaaggagagcattgtctaagacctaagtgctgctgagcgctttctccaagtctctccatgagtcagacacagatagaaccctgagatattcatattctctctgtctccatctttctctgtctctctctctctctctctctctctcacacacacacacacacacacacacacacacacacacatatacacaccacatgctatgcaagtactctaacaccaagctacatcccaagctcttataatatttttatttagagacaaggtcttactaagttgttcaggctgaccttgaattggatatatagttgaagctgacctccaatttatcatcctcctgcctcatcctctcaaatagctggtaatgtaggcttatgccactctgcctggccctaaggatggtcttttttaaagtactttattttgaagtgtgtgtgtgtgtgtgtgtgtgtgtgtgtgtgtgtgtgtgtgtgtgtacctgtgtgcctgcatacgtgtggagtccagaagagggcatcagaccctgagaactggagttataggcagttatgagtcaaactctggttctttgcaaaagcaatatgacaatattaaccactgagctagctcttcagtccccagaaattggttttttttccagtttcaacaacaactcccaaggaaggcagtcctggggggcaggatgtgggcactggaacataccagtggggctacacctacttaccaaagccctttctgtataggctgagaaacccctcagaagatgcagccaaggatcttcctgccatccgggaccttaagaagctagagtttgcgtaagtgaagggagaaaccacctcattgccccaaggttgtttctgccatcttcactgatcttggggcagtgacaaggtgagcagaaggggagagattggatgactcctgcccactcacttaaccactgggaaagtagccttcctctgctgagtgcggcttgtttgggtaagtgcaggggtcactcagagcagcagagaattggccatttacagggcaatgcagacacatgtgcatgtacacacacactgtacacattcacactcatacatataacacacatgcatatgcatacacacgtgatttatacttatgcacaacatatagcacataatttcacatgtacacactcagacacatatgcacatgcatacttgcctctgttagaaggatccttcttgagaaagttgagtgggtggctcagcgaattgggtgccagcttgactaggaccggtctggttgggcactgagagtcttgcatgcttaggatccactccatctcagcaaactgggacaattggtcccccaccctgtgtagccagggtagcaggaatagagatgataggaagcagtaggttctagagagcagagggtgcctgggctatgacaggggagccctgtccagtacacgggccctgaagagccccaagagttatttaagtctggctgcctgaacaacttttcccccagtgctgagggttgagtccagggccttgtgcatacctgtcaggcactctaccactgaggtacatccctacccatttatttgcttgtttgtttatactccatgctggcttcaaacttgctatataaaccaagccaagctatataactttgaacttctcatcttcctgcctctacctcccaaatgctagggttataggcacactctgccacgccaaacttatgtggtgcaagggatagaacccagggctttgtgcatgttaagcagacactctgcaattcagctacattcccatcccattcgtgtgtgtgtgtgtgtgtgtgtgtgtgttattttgaatggggttttaatatttagtctagccttgaacttttgctctccttgcctcagccctgccaagtacctacccaggattgcgtgcctattccaccacccggctctaacacagcattccacctgtaaaacacttcacttcatatcctagacagttggggagaaggacattgatgtcaactctcacttacaaatgggcatagtgagaccagagatgaagtagtttcttcagcgttataaacaccaggttagcttgcctggctgactagcaaactcttgtcagtgtttggtcctcttagagatgagatcactccagccaggaagaccttgtctcaaaacaaagagagctacccacaagatcctcaggtcattttacataaagtccccttcatgagaagagtagccctggaagacagtcattggacagatttggaaactgaggcttggtgatgttagtgatttgcctgcggtcccagctggccacacactcgctgccagcttccctgcaccccccacagataaccaagtttctcttgttttcaacaggacataaggtgccaaatatgtacaaaggtaaaaatattgctaaaaagaggaaatgtctgaagacagccgcagggtgttttctggctttgaattattttcagcataaaaaagcccctccctggtgatcggaactgcactctgggtaccagaggctgcggggtggaacaggctagagccaggccaacagccacctacatgctgggagtcctgagacagttctgaggaagaaaggaaggaaacaaggggggctattttagggtgtctcttgcagccacccccatgttccccaccctgcaggcctctttgactgtctgatcagtccacttaaaaactctcacatgagcggaggcggaggcggatacatgtggctcagtcggcagagtccttcctagtaggcacaagccctggttcgatctccagcgctatctacacggcatggggacacacatctgtggtcccagcatctagggtagaggcaggagaatcacttcagtcatcttacacatcttaggttggaggcctaggctcgagagctggcttctctatgctccctcttcccgctttctcctgaaacaagacccagcccccggtctctgggccactgtggggcagtgcctctgccctgaatgctcttccctatgcagcaggtccacgctggccctcactttcctctgtttttttttttttttttttcttgtttatttggatatgtgtgtgcgcatgtgtgccctgttgtggaggttagagaacaatttggctctttctaccatgccggtctcagggacaaaattcaggtcccaggttgggtgcaggcactttgaccccactgaccttgtctctcggtgttctgagacccttcctgaactcccccacagtgaatctgtctgcagcatttcttatctctcataagcagtgactgaatgggaaagctcatgggtgatccagaatggggttgggtcccatcttgggcccccccaggctttccccacactgacaagatccttccagccttcttccctgcagcacctggagtaagcctcctggacatcacggtccagaccatgaaccaagttctttatctcaatactaactctatgcaagtagtatcctagcattgggggagaaatgaggttttcccagtgtactgaattagtgagttgcaggttcagtggcctctgtatctgtgcacataaacacacacacacacacacagaggagagggggagggaaagggagggagagggggaaggaggggagggagagaaaatatatttaaaaacagaagctcatgcaatctggtgtgaccctgggaacagaccttggctggtgtggggacttcttcaccaggcaagggtgagcatgtatagacatgagcagcagtgaggacaggcttgctgctgaaagcagaaagtgaagtgggagcgtcccagcaggcctctgggtggtcctgagcagagcagtggcagagcagcacagtgggccattgagagcccagcaggcagggataagacactagggagtcagggagggagcctcagactgttctgcatctttgcactccactggccgtttaggtgtctgacctgtctgacctctactgttgattgcttcctaggttgggccccatcttgggcccccaggctttccccacactggcaaagatccttccagccttctcttctctgcaacacctggagtaagttacagaccctgacaccctccaccctctgccccgactttgtccccagggcacatggggagtctttctcctttttcctcttccctaccatctggggaaactgtgtgggagtcaggtgaccccaccatggggacttatgacccctaatacagggaagggacagagaatgggacaccccagattttaaaaaaaagtttggagttttgcaagctttgaaattcttttccccacacagcccccttcacggctcttcgaaaccacaaagggcagacaggtgggagcagggagctctgttcaatagattaggttccaagagatgtgggggggggggctgaccagcaggctcctacaaagacaagcagacagtctagtccatggtgtgtggccagctgaatggcgcccccaggaggttaaggccagctcccataagcccagagaggagcttatggtcaagagaaccagggctggaggacgctggcctggggccacaaggtaaatggctgcatttgatcccacctgcagcctggactcacttagtgagaacaagatcggagacaagggtgtgtcgaagctctcagccaccttccctcagctgaaggccctggagacgctcaagtgagtccactggccctgcctccttcctgcttctggtacagaacctttctccagccgaccctccatcctgtcatctgcccatctctccgtcattcactctttctgttctagatcatgcactctcccattcagccactgaaaatccattctctggtcttccaaatggatgtccagtccagggaccacctcaggaacactggccacctctttaagacatgatctctctctggcttggaacttaccagttatgccaggctacccagccaatgagcccccagagctccacatctccacctcaccagtgctgggagcacaagcatgcccaacatgcctggctttctgtgtaggtcctggggatcgaactcgaggctgtgagacaagcattttatcgagttatctctccagacctcatttattggtttgatgaacaaagacttagggaagccttgctatcctgggcaacagtggagaccccaaagatcctgctccctgacctcaggcctcttcatatacaataaaccagaagcaaacaaataaataaacaataattataaaccagtgagctggggaggctgagacagtggaataaccacacgtttaaggccagcctatgaatcggtctcaaaaaaaacaaatggtgggggaggggctggcagggtggtttagtcggtgaaggtggctgctactaaccttgacaatttgagttctgtcctcgggacctacatggtagaaggagagaaccaaccaactccggaacattgtcctctgacctacacacacactaaaaaagagaaagagaaaaaagtatcaaaataaaatacactgtaataaaagtttaatgcatgaaaactgttctgggatgttggaagagacaggataggttggggcttagcagtggaaacactgagcggtggaagttgtctttagctgttttatgctttgggaagttaaggtagaatgggtgtgtgggagatggacatgatacacccgtgatcccagcgctggagagactggggctggaggatctttgagttcaaggctagcctgggctacatgacaccttgtttcagaacaaaagatgtaaaaggggccaataagatgccttagagggtaaaggctcttgctgcacatgccgggagataagagtttggtctccagaactcatgtaaaagcatgtcaatgcagaaacattgctctcctcctaaagcggttaagagtttatttgggagccatcttgagtgaccgtggctcagaaacacagatctaggtaatctcagactccatgttccaacatggaggcaattccatgaagttttatagttttaaagaacaaagatagccatataaaatacattggcatggccagacagttgtggtgcatgtctttaatgccagcacttgggagccagaggcaggcggatctctgtgagttcgagaacagcctggcctacagagtttcaggacagccagggctacacagagaaaccctgtctcgaaaaacaagaaacaaaacaaaacaaaaaatatattggtaggaacccgagagaagcaggtacaccaagtagggggagcttttctacaggcccaagatgtcatctgagggcagtcttagcttttggattggtggaagctagtggtcagctaagttaatagagcccaagaggttttatccaccagccacacttctgacacagaggtgggtaaggactggctgttcttgggcctctcccgacctctccacaatctttcaatcagtctctgcgacacagagtctttctaggaattctaattcacaatataataataataataataataataataataataataataataataatatagaagcactgagaacatagtgatgataaagcacttatctaggacacacaaggccctaggttcaattcccacaacaaaacaaataaaccattttttaaaaaatctgtcaacactccatcttataaacaaggttaagaagcctgaaaatacccaaggattcatgtgtacatttcctgatgtgtaatgtctctataatttacaatggtccaggtataccacaagatagatttccctcccttctccactctccttctgaccttttttaaaaaaatattaatttgtttatttactttacatcctgatcatggcgccccctcctctcagtcctccctcacacagctcctccctccctccctccctccctccctccctccctcccccttccttcctttctattcccggacacatgagcatttattaagtacctactgtatgtagagctggaagatagccctaggggaaaaggcactatcaaattagacagcaggtggaggagaggacctctctctctgctcccacctctcccctcccctgccagcccactctctctgtaacaaacccttcatattggtgagtggtttctgtaggttcatcctcattacccatgacccttcccagggctggctatcatggctgtgtggctacagtcccctgtgaagcagcgagtttccagccggtgaggaagggagagccttccacttaggtcctggaccttctcctccctgtgtctccttagcttgtcccaaaacaacatcactgatgtgggtgcctgcaagcttgcagaagctctgccagccctagccaagtccctcctaaggctgaggtgagtgaggtaccccccactgaatgggctggggagatgggggtggggtggggctggnnnnnnnnnnnnnnnnnnnngaggtaggggtgaggggggtataggacccccttttgctgctctttgtggcacatcaccacagccttggggcaagtcgcttactagttccaagtctctatttcttcatctgtaaaatatgaaccatgtcaatggatcatgtgtcatactccagcgctatccctagtgagcagtagtagatggttgccctttacccaaggaagagcccactggaaagccctgcagtgctggcttctgggctgtccaccactattccagctagttctcacactgccaccttctggaagaccttggtgtagcagctccaacttctaaattcctttcagcaagtctttggtactaaggggcctgagagggaactgaatttggcccagagccccagccattcagctcagcagtagcagctcttggctagccatataggaaaggatttccttccccaagtctaggagaggtgtctgctatgcacctctactgaggcagccactcctacagccttccaagcaggtcctctttgtgccctgcaaaattcataatgtgtgtactcgttacctaaactaggttgtgctaagtgtataggattccctaacatgggtgtcttgggggtcgggggttggaggtcaggaaagtctaggtcatacgggcaggtgcctgtgggccaggaaggcatactaactactattgttgctgagaccagataccaaacaaagacaacctaaggaagggaggaaggaaggaaggaaggaaggaaggaaggaaggaaggagggaaggaaggaaggagggnnnnnnnnnnnnnnnnnnnnnnnnnnnggagggagggagggaggggttctttgggttcacagtgtgaggtgcagcccatgatggtgggagggcatgtggcaggaatgtgaaggcgaccggtcccattgcatctgcagccgggaagcagagagtactgagtgctgtgctcagcctgcttttcccttttacattttaaaaaaatactgtgtgtgtatgtgtgtgtgtacatgtgtgtgtatgtatgtgtgtgtgtgttgtctgcatatacacctatatggcaaacacacacacggtacctgcagtgaccagacgatgatagtaggtcttactggacttaaatggcttactgctatttcataatattgaatacattcattccaactacaaagtccccagagtttccaggttttcttcttcctgtggccaacccaactcaccttctgtggtagctcatttggccctgagcagtttctgtgtcacactgtgagacctgaatgatgcatagcccacagcataaaccaagagcctacctgctctccctacagtgaccccctcctaccagttctacaaatgagcagccgtgtgggtaggaagtagactggataggaagaggcacgtctttgaacctgggaagctcctccccttataatttccatgctttgggctgagaaagacctctctccctctccctctccccctcccctccctctccccctcccctccctctccttttccttctctcccctcccccagtctttcccctctttcccccttctttctttcctctcttctctctttcctaccccctctctctttccctctccttttcccctctcccctcccttctttctcccttcctcgtgtgtgtgtgtgtgtgtgtgtgtgtgtgtgtgttactgagtatgaagcccagagctgtttcatatataccggacaagcattctactactgagctataaccccagccttcttaactttctgtttttgaggggctgtggagatggctccacagttaagaacactggttgctcttgcagagaacttgaattccatttctaacactcacttggtagctcacaaccatctgtgaactccagtcccaggggaatctgatgccctcttctggcttccttgggcactgcacctatgaagcacagccatccatgaaggcaaagcactccccccccacacacacacacacatataataaacaaacatccatgcacacatataataaacattttttaagttctaatttgagacagggtctcatgtattctaggctggcctaatttgtaatccctctgcctcagtttcctaagtagctggaattacaggcctgaaccaccaagcccagtgtacaacttactgcccatgctgttgtatcttgaactcactgtggaactacaaataagtagtggcctcaacattctgggcctcaattagtccatctgtaaaatgggacagtagggcctgcctggggatgtgactcagttgttagagtgcttgcctagcatgtatgaggccctggattcattccatccccagcactgcataaactggatgtggtgcattgtaatcctagtactcaagaggtagaggcaggagaatcagaagttaaaggtcatctttgactacataccaagttccaggccagtatggggatacatgggaccttgtctttagatagatagatagatagatagatagatagatagatagatagatagatagatagatagaagtagtaatctcagttgagtggctatcacctggcctgaactggcccagcaccccaaccctctttcttcctctgttgccggcagcttgtacaataactgcatctgtgacaaaggagccaagagcctggcacaagtacttccggacatggtgtccctgcgtgtgatggagtgagtgtaggggctgggtggtgtctgtggaggcagaggatctcccacccacatcgtgagaagggttgaggtgggagttgtcatgcctcaggatgggtctctctcttcagtgtccagttcaacaagttcacggctgccggtgcccagcaactggcctccagccttcagaagtgccctcaggtggaaacactggcgtaagtcacatcgcccccagggctggagtatgtgagtgtctttagaagtcaaatcctacccctgccaactagtacctgatcctgggatgtcaagtgatttgcctgctggcctcagagatgaggatggcaatacctgcagacaagacttgttatgttagtaaaacttttttttttggtgggggtgggggtctcatgaagatgactgtctcccaagtgctggaattataagcatgcactgccacatccaatttcatgtggcaacggagaccaaagtcaggacttagtgctaggcaagcaggccaccacctgagccatatccccaccctaaacttttaggacaacgttgccacacaaagcactcaatgaatatttcatcaggatgaatcatatgaaattgccaaatccagtcattcttagaatataaaacaatagcaaagtcatcttttgtttgtttttgaaacagaattgtacttgaactcatgatccccctgcctcagcctcccgagtgtgtgctgcgcccaactttaaacttattcttattaagctgcagcgatgtttgttgtccagcaccttctactgttcagatgactttcatctgcacagttgtgcctggccttctcagacagacggtggggtctctccattcttttctcatggtgaccataacagaggcaaaagaaagagggaaggcacagctgcactcatagtcacaggggtaccatttattgtacctgtttgcagttgctcacatgctggcggggagcagtttagctgctgagctggccaggctgttaccttcaaagatccacagtgacctatttctgccagccaggtcctgcctcctaaagatgccacagcctcaagctttgtcccatccagggagaaagcattcaaagcacaagcctatgggggacagaccgaactgaaaccacagcagggtccaccttacagtgaacgagaatagggcagaggagatgttttcaaggtcacacagcaaactgggactgaaggggggggttctaacattctgttctccccatgctggtctgtatcctgccagataggatgtggttaaggctctagacagagtggggggcagggcttgtgagcagcttgccctcggtgtcctgctatgtttcctctaacctggccctgtggtcccatctacagaatgtggacacccactatcccctttggggttcaggaacacctgcagcagctggatgccaggatcagtctgagatgaccctgctgtactctggacaaggtaaccatgttggactccaggagggtcatctaggtcattgtccttgtgaaggggtgactaagggcatcgagcaaggctggttgggtgtcctagatccatgtgtcatctggagctatcctgtctccaaattggcaggtgttcttcagactgtggggacttaggccaaggaacctccctgaggtcagacttaaagaccaggaaaaacaggctgagccagtctcctacaatccccatccttggcattaggaagtccttcctttgaagctttatgtcttccttgctgctgtttcatcttcataggaaattaatatatttcctgccagcaacatgaagacaattgtcccctcaccgtgtgtctgtccaccctctcccctggcctatgttgtagttgtccttcagccccttcttcagtcccccacattgtgacagcccctactcttctgtcaaggctgcttctctggaagctcactgagtcacctgcctctcctgatctcccacagaatgtactctgggaacactgaccatgctggaccttgaactgggtactgtggactcagcttttctgtgggccatagcccataagagtcaacatcccatcaccctgcccctgcaggctcagagttgggccctgcctacacgaggaaaggacacaagtcttgctcttctgaaggccccaagaccagctccaggcccttacagcaccaggtacaaagacagccccactctgcggccgtgagcgctggtagacagaactggggctgccttccgtgggttcacccgggaggacaaaggccttctcttcgacactccaggacagaacgaggaacagaagcatccaagtgcctgcttgtccagaccagggccagcctggtgagaaagcatgtcttcctgctgctcccaacagggccacctagaggctctgaagacgctaagggcaacactggcctgcaaatctctagatgtgacagggagcctatggtagctctttctacttgtggcactgtttccataaactttaggtcaaagctgagtcgggcctggcccagaccctgggtgtgaaccaaaaggcagggagtggtctgcttcggggctgtggcggggagttcttctggcttcaccttcacggtcactacacttaaaatgcaccagctacgttcactgaagctctggggcttggtttatcccacaagtcccatctggggacatcttctgccccatctaatgcaaaacaaaacaaaacgaaacaaaacaaaacaaaacaaaacaaaacaaaacaaaacaaaaccaaaccaaaccagccgaactataataacttgaaacaatccacactccgctggccaggcaggctcagcagtgcccaccaacccagaagtcaggctggaatcatcttgagtgtgggtctagcatgtgacacaagttgctgtctgggagccctgagtccttaatgggacagctggctggggcttgccctccccgtagcattatagttatgttataggggggacacccagagaggagaaagtgaggagcccggccagcagagacagtctgtagactgctcagagcagggctcaaagccacacagtattgtttctacaacactctgcatgcgcccgtgtgcccaccatacagcccaccactgcctagatcctgtcttcactgcaaagatctttgtagcttccaaagatgcagtgaaaagttcttactcctgcacccgaggactgaagcagtgaccactgtacagagtggagtgctctctcctactgccctgctgcatcctgggagcagttctgtatagccacattggtcagccttggctacagctagcccaaaagggcttggcagcaccagtgccgctgctcctgtttcctctgggacaccccctttgagctcaggcaccacccatccctccatcgagacagtgacagcttgctttcttgtcttggcagagggagctgtgtggctccaccatgccagccctgatgccagcaggactggcacatcctaggaagtgggagctgggctagagggcctggggccggggtggtctgcatggctgctgggggcgattcttaaagagacaggtccagctgcagctcaggcttacattatgaactgttaggaccttgggctcagggtggcacatggaagtcccatttctgtggccaccagggacagcactgaggcactctccaaggcaggcatctgctgtacctgtcaggagaaaggcagatctgtatcgctcgctgcctttggtctgtctggaaatgccaaaaaatgtctctcattactctgtgttgatgatggctgccatcttttaatgagctgattaggtaaggcactcactatagtgctggggacatcactgattcttgatcctgtgtgctgggaagcgtcttaggccctttggcctgcatcttaggcccttggaagcatcaagggcctaagatgcttccaaaactgcaaaacaccaactcctggctgagctgcctggtttcatgctccattttgacatatacacaaggcaagtttcttctgtgccttagcttccttatctgtaaaatgggcagagtcacagtatcttctctcctgggttatgtaaaggctcaatgtggaaacaatattaataaaatgggtcagcaaaatggctgagggaataaagcaagcctggtgacccgagcttggttcccaggaccacactacggaagggagaactaacaagttcccctctggaagtttctgtgcactgcgtatgtactggagctacggtggttgtgagcctctgtgttggtgctgggaagagaactcaggtcccctgagaaggcagcaagtgctctcaatcactgagccatttctctagcccatttaaaaaacaaaaaacaaaaaacaaaaacaaaaaaaaaacgagttgaagccaatgcctggcacaggggttctgacagcctcttgtggactccacgggcactgtgtgggctcagtgcacaggcatacaaataaatcttgaatacataaaggtcatgtgtggtggcatacacctttaaccccagcacttagaaagcagaggtaggcagatctctgtgaattcaaggccagcctggtctatgttacacagggaggccctgtcttaacaaataaaactccaacacacagctcaatgcaggagttctcagcctttctttcaccctgtggtttattcctgcctctccctggaatgtcccttcccagactctatgcggctgacttcctgcaggactctgtgggacggaccctcctgcagctctgtctcttgtccctctgtgcctcactctccaaccccacctcaatattttctttttcaaacttttgtctgtgtaggatgtgagctctagggaagcaagggatctgtctgctttgatcatccctggtcgctctacacccagtcaggagccttgtccatagtaggtgcacagtaaatgtgagaaggatggttaatcctttgcacagcctcatgttaggtattcctacacacctgttgtaggcaatgctgccctaattgcacacagctttggggcggggctacaactgtattctaaactaggttagactagggaagaggactccattttttgtggtttttagagacaggatccacacacgtgaacaagatgttctaggttcctgtgctggaaatcttgcatcttagcaaacttaagtgagctgctgggtgtgactggccaggctgtgcactgcacaaaggctcctgggcagtggacacactagggttgcaccagagtggggcctggagtagaacagcagcaatttagagaaccttttggtaattagcatggtgccatctcgggggtaggttaagttgtgggttccaagttagaaagttggcattcatggggaatgccaatgtattagctttgctgtgacccctgtgaaggatctctgtgggtatgggcatgacatgctagaataggttaccaggccccacttgtgatgcgtaaaattctggggggatcggcagtctgcccatgtaatacactttcaatctaagtctctcctcaggccctgactttcttccaggcctttctccaaggatgactcttttcctgttatgtgtggctgtccttggagccaaaaaaccctgccatcttgggaaattcagctgcacaaaattcaaaattccctgttgcaaaaagctcatcccgtcatggaggcaaggagggccacaggctcctcccatgagtcctcaagcactcacacctgttgtaggcaatgctgccctaattgcacacggctttggggcggggctacaaccgtattctaaactaggttagactagggaagaggacttcattttttgtggtttttagagacaggatccaatgtagcccaggctggcacctaactggacacatagctgaggatgaccttgaacttctgattcttttgtctctgcctctggaatgctgggatattgacataaaccactgtgcctgttttatatgatgctggggcctagagctttgtgcaagcctggtaagcattctatcaaatgaattatattcccagcctcttccccattctttattttaaggtgtcattatatagcccttgctggcttggaactcacttttaagacctggttaggcgtgtggggcaggcaaggttagagatctgcccgcctctgcttcctgagcactgggattgaatgtgtgcgccactacgcccactccttccctcctccttaatggaggtgtatcctaggctctctgtgtgggacagcacgcagtcacttctatgagactcagacccaggggctttcagaaggcgagagaaggcagcctttctagagtgagttccctagtctctgactgcatctccagcaaactgtcaaccatgatgccccatctccaaaacacacacacacacaccagcaacagacaaggcaaaggaaattggagttgcttacatttttttaatgaaataagtcagcctctaagtattgcttttacaggtttatggaaatcaaggatctacaccattcacactatgcgcaccactcacacttccaaaaatagatttctagccagggaagcatggccttcccagtgcagtatctcagttctgtcaacctggagaggttaacccctgcctggccctggcatagccctcctcagagtgactccctgaaactacgatcaacagtcttgggtctgcagtcttcccagcttaaggtcaaccggcatcaagcaatgccgacagagtggcctgagaatgagcccatttgtcacttcagctctccatgtccttcccagaggttaagtgggggaggcaggtgcagctggggatgaagtgcagagaggtgacgtctggttgggtgcctgtaaacatccatcacaaaggtggcgagtcacaaccagacccaggacagtggagagccgggtggcaggcgagcggggccttcggagggcctggacactccctgtccctgcgccgagtcctcatttctcctggcagacacctgggttggggcaggaaccctgttgttggcatgagcaggcctaatcaagaagacaaaggacagtcatcaacagggccaaggcacctctggccagggctgtccccccccaacccccccggggcttgggtggggctcggaagccctgctctcacccttaggttctagactctccagagccccgcgctcaggctggggaagcttttcctctatcgtccttccttccttttaaaaataatttctcattgtttttaaatttatctatgttttaaaaaattatctattttttattttatgtgctttggtgttttgtctgcatgtttgtttgtgtgagggtgtcagatcttgtagttaccgatagacataagctgccgtgtgggggctgggaattagcccaggtgttctgggagagcagttagtgctcttaactgccaagccatctctccatccctaagagcaagttttaattctttgacaagttcatgtatgtatatagtgcagcaggacatttcttcctcatttctttcatactgtctttcctccaccctctcctcttgcttttcactttaacgtctcttttgatggtgactgactgagtggaactggggatgcctgcatgaacacagttgaggagtcattggcaggaacacaggaaactgaggaaaaggactcccactccaccagcagccatgaactcactaaccaccaagggcaccttagctagcgcaaggtctgctcgagcctcctctcccaccctattgcctgtcatttcctgctggattttgtttttgaggcagggtctcatgtaggtagcccaggatagccttcaccttctgattccctgccacaagagccgggaccttctgcactgctggaaatggaactcggaactcggggtcgggtggaatacaagctgagcaagtgttctgccgactgagctgcatcctgatcccgagggtgcgtgtttccagttcttatgaaggaatctgcttcactctatgattctggagacccacggcagttttccatggtgaaggagggctggccaggtgcgcaaggcaaggcaaaagatgccaaggtcagagaaggatctcagccataagagggcagctgagtaagctccaaggagtgggcagtgcctcacatctcacaggaagagcatggtgcttacaggaaggtagccagtcagctttgtgtccccactcggctcttcctcccatgacgcagcatcacccgtaagtcctggcccgatgtcaggttgtctcctccagtcgcctctatcccatgtttagctgtcatcagcatctctgtagcactggggtacccaggtccccctccttttagcccacctcagactcttccctctccaaacaccactgagcaccctgagacgtgagatgtgcagtgtgtcctgctgcatgacatgcaggggtgtgtgtggggtgatcatcggcatcaaagatttagcagtagctctggcccccaaccagcaaaagctggcagcacctccaggcaaccgtggctgttaaaactgtccccacctatttccaagagtcactaagcaggcatgaccatttccaccaggaactgtgcctcttcacattttacaggttgcaaaacaaaggcttagaaaagcagggtgagttgcctgcagttgcacaagtactgcaggcagggctggcactgcactggcaacaaatggggacaatcacaatcagggttgccactgcacccggtgctcttgtcgtgcaacatgactcttccttctgcctgccttccccagccctgagtaccgtgatcctgagacctctgtccgttttccagagcatgactggcccccagctatgagaacaagagagttaaagagttccacagtaagctgcttcccaccagtgactgccgggaaggtagtgtaccaacgccccagccccctcactggtacctggggtgacatcaaagcaccccattccggctcctggggcttctgagcaggactgagccccagattatagtggtagtctgcttagtgcccacctggtctatcttgctggcctcacttcccactctccatccacatggagtttctgagatctcctcccaaagaaacccaaggggtcgtggatatcttcaccctccttaccagcccgtgagttgatgctgttatgtctgttggacagataaagacatcaaagctcagaaagcacaagttactcactgaaaggtgctcagctcacaagtactgaaagctgcctagccatggtgccctggccctgtgtttccagcactaggaagctagggtcagagaatagcaggttagaggccagcctgggctatagggtaagactgagtttgaggacaagctggaccatctagtatgaacctgtttccacaaacagaacaagtgctgtgtaccaccagttcctgtgcccattttgcacgtcaatgttttacatgctgggccccaagctagaagacaggggtcaggcactgtgccaagttgtgagcaactttagcttgaagcaaccctcccaaagatgggacgtggtgtgagcaccgctggagatccacacagggctgggctgcacaggaaaggcaccccacggggagaataggcatagccatctcctgtagttctgagcatggagtggttggagctatatgctgaaatttctcccatcgtctatcagacttatctgctgaaggccaactgggaatacactctaccatgtcaggaaccttctctggttcccactgacaattccccccaccccctaccaccagacagggtcctccatccacccttttgtcccctcctgcctgcccagagaacctgtgggaagtaggggctgtagctacattggggcttccagaaaggctttctgagactcttgtcccatcacaccagagcctacttgtggctgctcttccaacgaaccttgggggagacagggaagtcttgaaagccttcatgttcagaagcctgcagcagaataatttactgagattccccctccggggtgcctactgcagagatgccccagcccagggtagggatggggtaggaatcaccaaggaggcctcatttcctgccagtcctctgactacacaagtggcccagcagctgctggtctgactgagccttttgacctaggagccctgtccctgtgcccgcaccttgacctaggtttcagtaggtgctgctgatttccaactcatttgccaagtctgttagtgacagccaatgatgccaggtgcctgtttactcaagttcctctcctttaaagcttttttttccatcttaaaagccgatttaagaactgaagatatgttcagtggctaagagcatccactgctcttgcaggggacccaggttctgttcccagcacccacatggtggtttcgaattacctataactccagttctagggactccaacggcctcatctgacctccacggtcccctacatgcacatggactcacataggatgcataaaataaataatttttttaaaagttgatttaaaggaaattatgtaaaaaacaattcaggggccatcaatgcggcttagctgatataggtacttgctgccaagcctgacttccttagtttgatcccaggatccacacagtagaaggaaagaaaccaacttttacaagtttctctctgatatctacatgtgtaccatggcatacccatgcccacccttgcatacataaataaatgtaataaaagaaagaaggtgaaggtggtcggtggggagcagaaagcagccttctcggggcacggacttagtgcttctcttctagacagccttctagaaactcacggcacacccctcttcctccacatacccaaaatgcatggcttgcccagctctgcagacatctgagacctctgtgctagaggcagaccgtgtagcaggccccacctggctcggggccaagggagtgatgacaatctggccacctccctggcagcaagggaccggaggaaagaagcttccccacactggattagcgctggcatctcgggcctggagtccacacccaggctggctctcactaggggccatctagtgtgtctgcagctgtccacaattccctacatgccggcccaggagctcctgaagctgtcacatagcacctggacattactcatcaaacaggctgagtgcccctatctccaatacctggtccagagtgttttggcttctatgatattggagcacagtaatgaatgcctggaggaactgaagcaagtctaaagtagattccatctacccgccaggacatgaatatggaggtcggaggacagctttcatgagactggtctccccccgggtgtgtcctggggctctagctcaggtcattaagcttggcagcaagagctttttacctgctgagccatctcgcaagctccaacaatgtagttttctgcaactttttttttccctctctgagacagtttcactctgtagcctgggctggactacagctctgatgcttctgcctcagcctcccccgtgctgaaatcagaggtgctggccactttacctggcccaattcaaaagtatttttattactgttttgatgtacagtcttactacaactattagctggcctcaaattcataatcttcttgcctctgtctaactatgaaaaaataacccagcacttgtaattttaaaaaggtaatggggtaatgtcaaggagacagtgaagaggacacctatagccagagaaaggaaaaagcaggaaggtcaaggtgccgtgagcctgactcctccgctccctccccgggattcctgcagcctagcacctcacttcagaaactctgggtactgtggatggctcatagctgggcatctaacacgggtcactgaactgccccaagcctcagtttccctccaagtgaccatcccaaggtgatgcagggaagctctgtgccagaggcacccagttctagcctctcagccaagctcccttcccggcaggaagcctgaggaggaggccttcctttagggatgagggatgacagctgcaagcgcatctcagctgactctcagtgggtaccaagcatcaccaagcccagtctgcttcacaggcagtccacagtgatgctctcttctagttactggccccagaagagcaaggaaccccaataaaggggggtcctggggtaggggtcccttggtctaacacatccaaagtgttggtagaactggggtttaaaccccaaatgtgtgtgactataaaaactttaggaaaccattttaggggtcacgtgagctggctgaagcaatcatacatccataccaaacacagattgctctgttgctcttggtcaggccttactacttctcagagagagttctaggttggtgctgggaactttcatctagcagcactagctcaacacataaagcagttcccagccctcaccattagctggcttcttcttgtggtgacatagcattcacttaaaaatagatccatgcagtctaggcgtgcgcctcagtagtaggatatgtgtttaggatgtgtgaggtactgggctggatcctcagaaaaacctaaaaaacagtaaaatacagtcaagagggcctggggccagagtttagttggcagagtgctttcctagtgttcacgaagcgctggtttctatccacctacactggcactgtgggacacatctacacccataaagcaggcacagtgacccgagactacagccccagcatttgagaggtggaggcagcaggagaggaagcccaaagccacggcagctagacaggaagtacagggccaaacaaagtccacatgagaaaggacgctttttgttgctgctgttctttagtttgtttgtttggatttgttttgttgttggtggtgggttttttgtttgtttgtttgttttgttgttgctgttgttgttgtttttgagacagggtttctatgtgtaaccctggctgacctggaactcaatctgtacaccagcctggccttgaactcagagatcctgcctctgcctccagagtgctgaggttaaagatgtgccgacctttttttttttttttttttttaaaccaaggagcactaaaactctaaggaaaagcattatttaccttaaactctaaaaggaaaagcagtaactcgcagtagagagacctgacacatatcaccaaagctcacagggccagcatggtacagggggcgtgtggctttcagaattctgtactgaggacacacattttcctgccaagatcacatcacctgaatggaatcctgagctcagacggacacctgacaaccccaggcagagacagctggcaaacgccacaccagcctcttgcacattgccaatgtcacacccagacatagacagactgagcatttggtccagaataaagaaagcagtgacctcaaagcttacacacttatcattgaaggacatttctgggacatcaaaagctgtgaataaagccagagagcaaagtgctcctaaatcctatccctgtccagctgctgatttcagccaggtgtggtggcacccaactgtaatccagcacttgggagacagagcaggaggatccggagttctaggccagtcttgattatagaagactccatctctaaaaacaatgacatcttgctggctttgacaaggacactacagataccaagtagatccttcttttaggaaaatacagaccaaaatattcaggaccagaggaacatcatgtctgcaatgcactctcaaatggtttagaacatgaccatccacatgtgtatg

SEQ ID NO: 252 - DNA, 5008 bp, Mus musculus
agaccatagtctgtgtgccaccatggatctgggatctccagagggcagctacctggaactccttaacagtgatgccgaccccctacatctctaccacctctatgaccagatggacctggctggggaggaggagatcgaactcagctcagagccagacacagataccatcaactgcgaccagttcagcaagctgttgcaggacatggaactggatgaagagacccgggaggcctatgccaacattgcggaactggatcagtacgtgttccaggatacccagctcgagggcctgagcaaggacctcttcatagagcacattggagcagaggaaggctttggtgagaacatagagatccctgtagaagcaggacagaagcctcagaagagacgcttcccggaagagcatgctatggactcaaagcacaggaagctagtgcccacctctaggacctcactgaactatttggatctccccactgggcacatccagatcttcaccactctgccccagggactctggcaaatctcaggggctggcacaggtctctccagtgtcctaatctaccacggtgagatgccccaggtcaaccaagtgctcccttcaagcagcctcagtatccccagtctccccgagtccccagaccggcctggctccaccagccccttcacaccatctgcagctgacctgcccagcatgcccgaacctgcgctgacctcccgtgtaaatgagacagaggacacatctccctccccatgccaagagggtcccgagtcttccatcaagcttccaaaatggccagaggctgtggagcgattccagcactccctacaggacaaatacaaggcattgccccagagcccaaggggtcctctggtggccgtggagctggtacgggccaggctggaaagaggcagcaacaagagccaggaaagggagctggccactcccgactggacagagcgccagctagcccacggtggtctggcagaggtacttcaggttgtcagtgactgcaggcgaccaggagagacacaggtggtcgctgtgctgggcaaggctggccagggaaagagccactgggccaggacagtgagtcacacctgggcatgtggccagttgctacaatatgactttgtcttctatgtcccctgtcattgcttggatcgtcccggggacacctaccacctgcgggatctgctctgtcccccgagcctgcagccactggccatggatgacgaggtccttgattatatcgtgaggcagccagaccgtgttctgctcatcctagatgctttcgaggagctagaggcccaagatggcctcctgcacggaccctgtggatctctgtccccagagccctgctccctccgaggactgctggctgggatcttccagcggaagctactgcgaggctgcacactgctcctcacagcccggccccggggccgcctggctcagagcctgagcaaggcagatgccatctttgaggtgcccagcttctctaccaagcaggccaagacttacatgaggcactactttgagaactcagggacagcggggaaccaagacaaggccctgggcctcctggagggccagcctcttctctgcagctatagtcacagccctgttgtgtgcagggctgtgtgccagctctccaaggccctgctagaacagggcacagaggcccagctaccttgtacacttacaggactctatgtcagcctgctaggtcctgcagctcagaacagtcctcccggagccttagtcgagctggccaagctggcctgggagctgggacgaagacaccaaagcaccttgcaagaaacccggttttcatccgtggaggtgaaaacctgggcagtgacccaaggcttgatgcagcagaccctggagaccacggaggctcaactggccttctccagttttctgctacagtgtttcctgggtgctgtgtggctggcacagtgcaatgaaatcaaagacaaggagctgccacagtacctggccttgactccgaggaagaagagaccctatgacaactggctggagggtgtaccacgctttctggctggattagttttccagcctcgagcccactgcctgggagctctggtggagcctgcagtggctgcagtggcggataggaaacagaaggttcttaccaggtacctgaagcgcctgaagctggggacactccgggcagggaggctgctggagctgctccactgtgcccacgagacacagcaacctgggatatgggagcatgttgcacaccagctccctggccacctctccttcctgggcacccggctcacacccccagatgtgtatgtgctgggcagggccttggagacagccagccaggacttctccttggaccttcgtcagactggcgttgagccttctggactgggaaacctcgtgggactcagctgtgtcaccagtttcagggcctccttgagtgatacaatggcattatgggagtcccttcagcagcagggagaagcccagctactccaggcggcagaggagaagttcaccattgagccatttaaagccaaatccccaaaggatgtggaagacctggatcgtctcgtgcagacccagaggctgagaaacccctcagaagatgcagccaaggatcttcctgccatccgggaccttaagaagctagagtttgcgttgggccccatcttgggcccccaggctttccccacactggcaaagatccttccagccttctcttctctgcaacacctggacctggactcacttagtgagaacaagatcggagacaagggtgtgtcgaagctctcagccaccttccctcagctgaaggccctggagacgctcaacttgtcccaaaacaacatcactgatgtgggtgcctgcaagcttgcagaagctctgccagccctagccaagtccctcctaaggctgagcttgtacaataactgcatctgtgacaaaggagccaagagcctggcacaagtacttccggacatggtgtccctgcgtgtgatggatgtccagttcaacaagttcacggctgccggtgcccagcaactggcctccagccttcagaagtgccctcaggtggaaacactggcaatgtggacacccactatcccctttggggttcaggaacacctgcagcagctggatgccaggatcagtctgagatgaccctgctgtactctggacaagaatgtactctgggaacactgaccatgctggaccttgaactgggtactgtggactcagcttttctgtgggccatagcccataagagtcaacatcccatcaccctgcccctgcaggctcagagttgggccctgcctacacgaggaaaggacacaagtcttgctcttctgaaggccccaagaccagctccaggcccttacagcaccaggtacaaagacagccccactctgcggccgtgagcgctggtagacagaactggggctgccttccgtgggttcacccgggaggacaaaggccttctcttcgacactccaggacagaacgaggaacagaagcatccaagtgcctgcttgtccagaccagggccagcctggtgagaaagcatgtcttcctgctgctcccaacagggccacctagaggctctgaagacgctaagggcaacactggcctgcaaatctctagatgtgacagggagcctatggtagctctttctacttgtggcactgtttccataaactttaggtcaaagctgagtcgggcctggcccagaccctgggtgtgaaccaaaaggcagggagtggtctgcttcggggctgtggcggggagttcttctggcttcaccttcacggtcactacacttaaaatgcaccagctacgttcactgaagctctggggcttggtttatcccacaagtcccatctggggacatcttctgccccatctaatgcaaaacaaaacaaaacgaaacaaaacaaaacaaaacaaaacaaaacaaaacaaaacaaaaccaaaccaaaccagccgaactataataacttgaaacaatccacactccgctggccaggcaggctcagcagtgcccaccaacccagaagtcaggctggaatcatcttgagtgtgggtctagcatgtgacacaagttgctgtctgggagccctgagtccttaatgggacagctggctggggcttgccctccccgtagcattatagttatgttataggggggacacccagagaggagaaagtgaggagcccggccagcagagacagtctgtagactgctcagagcagggctcaaagccacacagtattgtttctacaacactctgcatgcgcccgtgtgcccaccatacagcccaccactgcctagatcctgtcttcactgcaaagatctttgtagcttccaaagatgcagtgaaaagttcttactcctgcacccgaggactgaagcagtgaccactgtacagagtggagtgctctctcctactgccctgctgcatcctgggagcagttctgtatagccacattggtcagccttggctacagctagcccaaaagggcttggcagcaccagtgccgctgctcctgtttcctctgggacaccccctttgagctcaggcaccacccatccctccatcgagacagtgacagcttgctttcttgtcttggcagagggagctgtgtggctccaccatgccagccctgatgccagcaggactggcacatcctaggaagtgggagctgggctagagggcctggggccggggtggtctgcatggctgctgggggcgattcttaaagagacaggtccagctgcagctcaggcttacattatgaactgttaggaccttgggctcagggtggcacatggaagtcccatttctgtggccaccagggacagcactgaggcactctccaaggcaggcatctgctgtacctgtcaggagaaaggcagatctgtatcgctcgctgcctttggtctgtctggaaatgccaaaaaatgtctctcattactctgtgttg

SEQ ID NO: 253 - protein, 1057 aa, Mus musculus
DHSLCATMDLGSPEGSYLELLNSDADPLHLYHLYDQMDLAGEEEIELSSEPDTDTINCDQFSKLLQDMELDEETREAYANIAELDQYVFQDTQLEGLSKDLFIEHIGAEEGFGENIEIPVEAGQKPQKRRFPEEHAMDSKHRKLVPTSRTSLNYLDLPTGHIQIFTTLPQGLWQISGAGTGLSSVLIYHGEMPQVNQVLPSSSLSIPSLPESPDRPGSTSPFTPSAADLPSMPEPALTSRVNETEDTSPSPCQEGPESSIKLPKWPEAVERFQHSLQDKYKALPQSPRGPLVAVELVRARLERGSNKSQERELATPDWTERQLAHGGLAEVLQVVSDCRRPGETQVVAVLGKAGQGKSHWARTVSHTWACGQLLQYDFVFYVPCHCLDRPGDTYHLRDLLCPPSLQPLAMDDEVLDYIVRQPDRVLLILDAFEELEAQDGLLHGPCGSLSPEPCSLRGLLAGIFQRKLLRGCTLLLTARPRGRLAQSLSKADAIFEVPSFSTKQAKTYMRHYFENSGTAGNQDKALGLLEGQPLLCSYSHSPVVCRAVCQLSKALLEQGTEAQLPCTLTGVSLLGPAAQNSPPGALVELAKLAWELGRRHQSTLQETRFSSVEVKTWAVTQGLMQQTLETTEAQLAFSSFLLQCFLGAVWLAQCNEIKDKELPQYLALTPRKKRPYDNWLEGVPRFLAGLVFQPRAHCLGALVEPAVAAVADRKQKVLTRYLKRLKLGTLRAGRLLELLHCAHETQQPGIWEHVAHQLPGHLSFLGTRLTPPDVYVLGRALETASQDFSLDLRQTGVEPSGLGNLVGLSCVTSFRASLSDTMALWESLQQQGEAQLLQAAEEKFTIEPFKAKSPKDVEDLDRLVQTQRLRNPSEDAAKDLPAIRDLKKLEFALGPILGPQAFPTLAKILPAFSSLQHLDLDSLSENKIGDKGVSKLSATFPQLKALETLNLSQNNITDVGACKLAEALPAKSLLRLSLYNNCICDKGAKSLAQVLPDMVSLRVMDVQFNKFTAAGAQQLASSLQKCPQVETLAMWTPTIPFGVQEHLQQLDARISLR

SEQ ID NO: 254 - DNA, 86149 bp, Homo sapiens
  misc_feature (1)...(86149): n = A,T,C or G
taaaaataaaacacattgctggtctggcacaaagataaggctccttagatcctacaaatggcatgaagttaagaatgctggtgagcactcagtaaaggtgtttttttttttcctgaaggttcctatcaaactctagagaacctgagcttcctcctttgaaagctgtagagcatactaggagaactcaggtgagaatttttgttttgcttctgcttttttgagacagggtctcactctatcacccaggctggagtgctgtggtgcattcacattcactgcagcctcaccctgctgggctcaagtgatcctccctcctcagcctcccaagtagctgggactacaggcaccaccaagcctcgctaacttttttgtattttttgtagagacagggtttcgccatgttacccaggctggtctccatctcctgagatcaagcgatctgcccgcctcggtgtcccaaagtgctgggattatagtcatgagccaccgcacccgtccacaggtagatttaatggtagatttctgcatacagcggaaccctaatggagtacactgtcactgtaagaatgagcaagagctaaaccctaccagagaaacagctttgaaacttgcctgtcccaatcttagggttgaatgtaggaaaagaaaaatatcttacctgagaacttgtcattacaaaggggtccttactcaggtttgtgacctgaattcatgctatctagtaataataataataataatataaagatgttataaactggaagtagggtgctttaagattagcagaggtggagtcaactcctctctaatggaatttaactttattccaggattcaaaggtcacctacaatgaagttctaaagaaatgaagagctcacattaaaaaaaaaaaattacacacacaggcaaagaagcatagcatcttgagtggaagtaaatagaaaccatagacagtaaacacagaggtcaggcccggtggctccctcccactttgggaggtcaaggtggaaggatcactttaggccagcagttcaagaccagcctgggcaaaatagtgaggccccatctttacaaaaaagtttaaaaattagccgagcatggtagcaggcgcctataatcctagctactttggaggctgaggcaggaggattacttgagctcaggaattcaaggattcgaactgaggaattcattgagcagtggtcacaccagcctgggcagcagagtctctaaaagacaaataaacaaacccagagacttcggatacccgaatagagatacaaatgtgtaaaatcaaagatgtgcttaagccagctggcggagctcgggagagctgattgtgggcatctcttcccaactccacgtgcagcaatatcacattggtagcctgacattgtccatggtgggaatatttacaccacggaggttggcaaactctaaattagggcttctattttttttttttaaagagacagtgatacagttgtttaacatttactagaagactgctgaatatatttattttatttatttatttattttcaaataccaactcaaatcagatgctgaatttatttgaagattaacagagaagctttaaaaaaaatcagggaacagggactataaagaacaactgggcaggacacattggttcatgcctgtaattccaacactttgggaggccgcccaagagtttgagaccagcctgggcaacatagggagaccccatgtttacagaaaaatttaaaaaattagccagacatggtggtgcatgcttgtagtccagctacttgggaggctgaggtgggagaattgctcgagcccaggaggttgaggctgcagtgagctatgattgcgccactgcactccagcctgggcaacagcgcaagactctgtcaaaaaataaaaattaaatgagtaaattttacaaagaacaaaataagacttctagaaatgaaaaatataactaaaaatgaaaacttagtacacaaattaaatggtaaattagtagattttctgattcactaattctgaagaagaaagatgtaagagatatgttaaaagacatagaagacaggtgtaacataaaacaaattggagtttcagaagtaaataacagagaaaatgggaaaggtaatacttaaggataggtgtatgtctttgtatatatgcatctctattcaagagaacatttatcttgaatgtgctcttgataagacttcaaaggaaagaaaaaatgcactctgacctggaaattttgatcttagtttactaaatgtaatttgtctgcattgactatttagtctacgtcttctaaaacttcagagcaggccaggcatggtggctcacacccataatcccaggactttggaaggctgaggaaggaggatcactgagatgttaggattacaggtgtgagtcaccacacctggcccagatttacctttaactaataagactgtaagctgcataagactggcaattttcttttttttttctttgattttttgttcatgattgttttccctgtttctgttagtgccccactggggttgactcatttattcaataaatgaatgagtttgttagatggctactacacgccaggccgagtctaacatatgatgaacatcatttcccagttgaggaaactaagacatagcgctataagggggcatgttcaagcttatatgtaataaagcagggattcaaatccacttatactaacaacatggccaggcgcggtggccgacacctgtaattgcagcactttgggaggtcaaggcgggtggattacatgaggccaggagtttgagaccagcctggccaacatggtgaaaccctgtctctactaaaaatacaaaaattagcagagtgtgatggcgcacgcctgtaatcacagctactcaggaggctaaggcaggagaatcgcttgaaccgggaggcggaggttgcagtgagctgagatcatgccactgcactccagcctgggtgacagaccaagactctgtctcagaaaaatagaagaatactgataaaggtggcaggaatggtggtggtgatgatggtggtgatgacagtggtggtgatgatgatggtggtgatgatggtggtggtggtggtnnnnnnnnnnnnnnnnnnnnnnnnnnnnnnnnnnnnnnnnnnnnnnnnnnnnnnnnnnnnnnnnnnnnnnnnnnnnnnnnnnnnnnnnnnnnnnnnnnnnnnnnnnnnnnnnnnnnnnnnnnnnnnnnnnnnnnnnnnnnnnnnnnnnnnnnnnnnnnnnnnnnnnnnnnnnnnnnnnnnnnnnnnnnnnnnnnnnnnnnnnnnnnnnnnnnnnnnnnnnnnnnnnnnnnnnnnnnnnnnnnnnnnnnnnnnnnnnnnnnnnnnnnnnnnnnnnnnnnnnnnnnnnnnnnnnnnnnnnnnnnnnnnnnnnnnnnnnnnnnnnnnnnnnnnnnnnnnnnnnnnnnnnnnnnnnnnnnnnnnnnnnnnnnnnnnnnnnnnnnnnnnnnnnnnnnnnnnnnnnnnnnnnnnnnnnnnnnnnnnnnnnnnnnnnnnnnnnnnnnnnnnnnnnnncagcagccacaggggccagcctgggacgtgcccatagtatccagggagctgatcctcttcctctcaaggggaagtagccactccagcagatgctgtgttcccagccctcttctccttttcaaaatctgcagcccagtgttcctcccaggaacgcagggtctggcccaggttctgtaacttacaccttagccgcatccatagagtaagatgattgatgctttccttgaattatttttggtgatgataagatcatatacagaaagcatctaactccccagtattctcactcaagaaatgatatctgaatttttaaaattatatcatcattgatttccagctggaggagcaggaactagagaagccagttgccccccacccaacaggtaggtgacgtcaaggaccacctaagctcctagccgtgaactggggaaatagagcctgggcattttacatgtaaccaacttcactgcccctctcaacagatccctcagcaccctctcttttccctgctttcagcctcaggctccaagcttctcatccccagggcccctagtgtcttcagagtcaagacccagatcttgattggtaacagaaccatgacaccaagcactaaactggtgtttcccaaagtgtggtttctgtgtcacccttctggcaggcagataactaagggaaaaggggttcacccataggtgttaaataacaaccaatcacttagtaagaaagccccctctcaatcatcatcatcttcatcattatattaggttacaccatatgaaacagcaatttttatgaatctaaaacaaacaaatatcagcagttttatatgactcaatctaataggatactttagacatataaaaacttataaagaataaaggccagatgcagtggctcacgcgtgtaattccagtactttgggagaccgaggcaggcggatcaggagtttgagatcagcctggctaaaatggtgaaaccctgtctctactaaaaatacaaaattagctaggcatggtggcacgtgcctgtaatcccagctactccagaggctgaggcaggataatcacttgaatccaggaggcggagtttgcagcgagccgagatcatgccattgcactccagcctgggcaaaaagagccaaactccgtctcaacaacaacaacaaaaaagttataaagaataatggctaggctgagtgcagtggctctcacctgtaatcccagtcctttgggaggctgaggcaggagaatcgctggaagccaggaattcgagaccaacctgggcaacgttgtgagaccctatttctacacaaaatttaaaaattacccaagcatggtggcacactcccagctacacgggaagaggctgaggtgggaggatcacttgagctcagaaggttgaggttacaatgaaccatgattgcaccactgcattccagcctggacaacggagtgagatcctgaatcagaaagaaagaaaaaaaaagatgaacagtattttctttaaaatgaccagttttttgtggaagagcagtcacagagagccctgatggcaaataacttatgacgattctggaaggaattacaggttggtaatcatagatgaccaatgctaccattggtgtggagattgtactagcagctgagctcatgaggagaagactctagaatacctatatctgaatgttgtacctttagcaacctgtgttaagggtctcttcttagaaatgtagcagtcccgggtcatagcttatggattcacttttacatgtaacactatactatgatgaaacagaaggagagaagatgataaaagattcaactattaaacctttaaaactcactcactgtcccaatgtgtaatttatttgaataactttattttaacaaacatcaacttcctacactttgattaagtctattaagtttaattggttaaaggcatacgaactccagaatgtttataagacatttctatctattcttacggtgatttttatttctttctctttttttttctagcacaaacaaacctgctttgtgtctcataatgcccatgtgtaagaatttttctggcatatatactgaagagtggaaatcctgagtattatttaatgattttgtaggcattaccaaattactaccctaagcaattacaccattctacatgctctccaacaaagtagaattcccatttttctatacccttaacatttttacttatctgctgatgcaagagagctttagcttggtgctactctatctttaatacctttctaacacttgctaactaccttttgtcacaaaaggagataggtccccaggatcagaaactcgaggaaactgaaatctaaactttcatattatcattttccattctgcatgggtttttttgttacagttgcctactattcttgcacaagggatactggctttccaattgtgataaagataggaaatttccttttaaaagaaattaaatcagtaagacagagtaaaacaaaatattaggtaaataatagtacagattgcatgtgatttggaggagaaaaaaaattatgcagggagctctgaataagtaaagatgggagaagtaatacactggtgattaattgcaggggaatattgctgagctcaagaccagtgggttctgcaactaggtaacacctccctggaaactgtagtatttcagaagtgaaaaatcctggggatcatgtaatccaacctatgtgtttcatgggtgacgacattgtggtccagagagaggaagtttcttgccaggcacagtgagtcagtggccaagtggaggctggcacccaggttttcttgactaagcacatggcaagtggccactggattgataggaacaatcaaagcagacttattaagtgattacgacagcagatccttgtccctggctctgtgcacccactgtttgttgtttcatcatcttgtaatgcagatctcctgcaacctatccttttagttttcttttatctgaaaatgtctatttctgtctgcgttcttgagggatatttgcactgaatgtagaactcaggatgaacatattttaaaatcttatctcttctaagatattcttccacagtcttccagccgccatggtttcaaacaagaagtcggtgatcattcaggtgttctatatgtactgtgttattttgaactggctgctttcacgagtatctttttagctttgattttcaacagtttggctattatgtgcctaggtgtggttttcttgtatttatcctacttagatttgctaagcttctcaaatctgtattccttggctatttttcttttttcttttctttcttttttttttttttttttttttgcttaaaacaacactaatttattttcttaccattactgtataagtcttacatgggtatcaacgggctaaaatcaaggtgaatttgattcccttccaaaggttgtaggagagaatctatttctgcggtttttcaagcttctagaagctactcacataccttggcttgtgacttccttccttcatctctgaagccagtaacattgtatctctttgactagtcttccacagtcacaccatatcttttgtccccattttctactttttaaaatttcaatagttttgggggaaacaggtggtttttagttacatgggtaagttctttagtggtgacttctgagattttggtgcacccaccacctgagcagtgtacactgtacccaatgtgtaatcttttatccctgccccaccccaacacttcccccagtccccaaagtccattatatcattcttatgcctttgcatcctcgtaatttagctcccacttacaagtgagaacatacggtatttggttttgatgaggatattttcctttacatcttagatgtctttttcctccatggttataatcacagctttaaaaatcattgtctgctaatttcaacatcagcgtcatcttgaggccagttttcactgattgtctttttctcttgaaaatgttacctttttcctgtttctttatatgtcaactaattttgtttttatttatttatttatttatttttgagatggagtcttgctctgtcacccaggctggagtgcagtggcgcaatctcggctcactgcaacttctgccccctgggttcaagcaattctctgcctcagcctcccgagtagctgggattacaggcacctgcaaccacgcctgtctaatttttgtatttttagtagagatggggtttcaccatgttgaccaggctgttcctgaactcctgacctcgtgatccacccgccttggcctcccaaagtgctgggattacaggcatgagccaccgcgcccggcctatgtcaagtaattttgtattgaacacaggacattagggatatgttgtaaacactctggattctgttataatctgaacagcattaatatttttgggttttatttcagtagggacataacttggctggaatcaaatgcaaaatctcctacccctacacccattgcagctcaaatcttcgttcagcttatttagccttagctgagctgcttggagtctgacctacgaatatatacatggtccagaagccagccagatatttagacaattatatacagaatttgggctactcctttctccttctctgtctgggatttctactttccagtaggtatttttgccccaaattctatcctctgattataaagggcagtaaaccgttctttttttttttttttttgagatagagtctgactctgttgcccaggctaaagtgcagtggcactatcatagcctactgcaacctcaacctctccaggctcaagtgctcctcccacctcagccttccaagtagctgggaccacaggcatgaagtcttaactgccctgcacagcactgattggaacttgccttcagactaaactcatgaactgggaaattcacctgtgaagttctcattttccatatattgactcccttccagtatctgcctggcctgtcactctccagtgccttcagatagttgttttttatattctccccagagtttatagttgttacctgtggtagcgttgatcatatgggagctggtcagccacactggaaatggaaatcctttgtctcatttaaatgaataatgcaaatggccccagctgagagatggtaatcctgagtctggaaggaaacaaagtcacggcatgttacagaatgggcaggagaacagtcgcctatggttctttaaaactgggttggggatttttagaatcataaaccagactggcttctatgcaaatcctctgttttgtgcattagtaagttggggatagtattaacaaatagtcagtgttcgttaagtgcttactaggtccagtgtagagacccttaaatgcatatgagcttcgattgcttttagtgggaaattttgcagaggaggagactgaggatttgtgaggttaaactcagggtgatagtaatttgcatgattaatcaataataatgatggttcatatttattgtattattatcatgttgtagataatgcactagggactctatttatgttatctcatttaatcctcccaacaaccctatcatgtaagtactgttaacagagactaaaaatgctaagtaaggcaggcgtggtggctcacacttgtaatcccagtactttgggagactgaggcaagaggatcacttgagcccaggaattcaagaccagcctgggaaacagagtgagaccctgtctctactaaaaataaaaaaataaaaaattagcggggcatgatggtgtgagtctgtagtcccagctactgggaaacagagatgggaggtttgtttgagcctgggaagttgaggctgcagtgagttatgatcacgccactgcacaccagcctgggcaacagagcaagaccctgtcaaaaaaaaaaaaaaaggctatgtaacatgcccaaagtcacataattggcaaggagcagcagatctgggacttgaacataggcagattagctcccaagcctatttgcttaacctctataccacaatgccttcttgctatggtaaaacatctgaaaagacctattaccctataggtcctctaaggaggcatgtcgccttcctcttagcaatactagattggctccaacagaaggctgtgggcttctctggcacatgcacctgggtaggacccagagaatatctgtggagtctgaatcaacccaaaagccaatatccatccgttcatcaggaaccccagcctacaacgcaaaagaggaaatcttcctaagtagaaataaactgtaataaattgcagaggttccctcgtcctggttttcacttcatgttttggatgctgcatgctgggtgagcggagattccaggcactggccagggcagctgccctgactccaagggctgccatgaacaacttccaggccatcctgactcaggtgagaatgctgctctccagccatcagcccagcctggtgcaggccctcttggacaacctgctgaaggaggacctcctctccagggaataccactgcactctgctccatgagcctgatagtgaggctctggccaggaagatctctttgaccctactagagaaaggagacctggatttggccctcctggggtgggcccggagtgggctgcagcccccagcagccgagaggggccccggccacagtgaccatggtggtaagttggcatcacttttaatcaaggagaaatgacagactgtagacagctcaaggattttccctcctctctgaaagggaagtcaatgggaaggcagactggtgagaaatccaagtgtctagtgagctggcaggagcagtgaaaacttggagcactgtctctgttgctgggtgtgctggagcgaacggcgtgcttcccactctgctggaaggaaccatcccaggggcacgcagccaaatgcctgcttgggttcactccctgagccctgacgatacaccaacattaacggggcatggatggacagatcagctcctgccttcaaaggggtctgctgtctagtggggaagatggatgcaggcacaatcagtgtgagtcaaaatgagagaaatggggccgggtgcactggctcacgcctgtaatcccagcattttgggaggccaaggcaggtggatcacctgagatcagttcgacaccagcctggccaacatggcaaaaccctgtctgtactaaaaaatacaaaaaacagccagacatcctggtgggtgcctgtagtcccagctactcaggaggctgaggcaggagaattgcttgaactgggaaggcagaggttgcaatgagccgagatcacgctactgcactccagtctgggcaacagagcaagactccatctcaaaaaaaaaaatagagaaatggggtgcagagaaaggaggagccagagaaaaagctgaaagcagagcccactgtgtgtgttgggggggggcatgtgtgcgtttgcatgcatttgcttgtgtgtgcatgtgtgtgtctgtgtgacacacagagacagaaaccgaaagacagagggagagcgagaaaggaagggagagaaagacagacacagaaagagacagagagacaggcagagacagggagaaaagggagggagaggaaggaaggtggaggctgatggaggaagagaaaaagggagaaggtgggggaaagaaagagagagaaagagagaataagaactcgcttacgggagagagaatgaaggccttatttttaagagcgttggtggcacacaatcatctcaaaccagaaagacaagcctgcactgtcctctttccactcacatccttggctcctccaactttttacgtctcctacccacttacaaagaagtcctcccttcattgtaatgtcacaactttctttctttttttgagacggggtctgttctcttgcccaggctggagtgtagtcgcatgatcacagctcactacagcctccatttgcggtgcttaagtgatcctcccacctcagcctcccaactagctgggactacaggcatgcaccactatgcctggctaatttttttttaattattttttgtagagatgaggtctcactatgttgaccaggctgcttgcgaacccctgagctcaagcgatcctcccaccttggcctcccaaattgctgggcttacaggcatgagccaccacacccaacctggtcataactttctaaagacggtgtttgttccatctccttctgaaatgcaagtcttgagagaataacagtgattgacattgattatttagtgtgccagaaacagcctaagcgcaatctagaaccctcttacttctcccttgaccttgagccctttgatccccatccttatttaacacttaaagaagaaaacagactctgcccaggggtgacgcaacttgcccaggtcccccaggtgggaagcggtgaagactggatttgaagacagacaagctttgatcttcaacttagccttcagggcatcaaatgcattttggcggccttatcttgggcaccagggcagtgttgtttaccagctttcctgccaagacaacatttctacagggctggttcttcttgtggtcaaattctcacccaagtggtttccatcgtctattggactcctctttaattctcttcctcctaacagtcacctaggcaaaggggcatctttaccacccaaacattctcccttggcttctcaacaggggcgcagacagccagtgtggtcttgatggtggcacagatgccacctgggggagaagccagaaccttcctctctccctggctgcagcccctcctgccccagccacatgtgccttcactgccggacacttcagcccctcccaccccctctttccgagagtgctggttcctgttatttaactctgtttcctccctcgggaggtaatatatttatttctgatcccacgtgactccagaaagtggaactgcactcggggcccagtgtggtcttcggggagctgggaggggtgcagggcaagttgctcttttcctgctttctctttctgccctccagccagcttccctccagggctgccaggcttgacctgcgacagtgggcaggtgtgctgctgctgggcagctctcagaggggaagaaagaggacagggcaagagaattgcatggtttgtaaacaaagggcactgactttcattttgatgggggttcggaaaaggaaatcatccatgtggggtttttgtgaccctccctctcaaccactctataatgaccttggccctctgctgtgctaaacgctgcactggctcccacgttactcagagaaaaagctaaatctggacaatggcccacaaggcctttcctacctcatcagctccctgctctcatcccctactcctgtctgccttgttcatctactccagccatgttggcaccctcgctgttccttagacacgctcagcacactgtctgcctcagaacctttgcacatgccgttccctctgcctggagcactgttctctaagcattttcttggtcaacctcctaaattccttctattctttgcaccttatcaatgaagcctgccctgaccaagccatttagaattgcaactcctccctccacactctgagccccctccccagattgattttttccccactttttttttttttgatacagagtcttgctctatcgcccagcctggagtgcagtggtgagatctcagctcactgcaacttccatctcccaggttcatgcagttctcatgcctcagcctcccaaatagctgggattacaggtttgtgccactatgcctggctaatttttgtatttttagagacagggtttctccaagttggccaggctggtcttgaactcctgacatcaagtgatccgcccaccccacaaagtactgggataacaggcatgagccactgcgcctggctccccaccttctgtatatcttacttttgtattacgtgtgtgttgtttattgtttgaccctcccactggaaaataaactccacatggacatggatctatgttttgatcacaatatgtcccaaatacctagcacagggcctgagcacagggtaggtatgcaatatatatttgttgaatgttcagtggatggatgcgttgatgagtgggtagatggatgaatggatagttcatgtaatgccattattcctactttaccaatgagtaaactgaggcacagagaagttaatgatttgcctctggtcatgacctgaggagggagactatggggtctcatgagtcctggccaattgcagtacttcctgcaaaaaaaaaaaaaaaaaaaaaaaaaaaagtactgctttagcttcctcttctaaacaacccaaggggctaccgtaaatctaccccaaatagggtggcagtcttcaaactgaaaccagcctgatgattcagaagtccccttcagatattgcagtgccttaggtgcaattgtgcagaaagcccagttctggagatgggagcttaggggtttcgctctgtgctacactgagcaacctgtgtgcatccagccccaggaaagttccagtgagtcccaagagtcaaagtccttgccctggaggaactcaggtgcctcagtgggaagttaaagcaaacatttaggcagtccctggtcaacagtgggtcacaacatctgaacaacatctatcagaggccaaagaagggggagctaggatgggtgatgatggaaaaagaaccaggctggaggctggacagctggacagctctggatctgaagccatgttctgctccttacgtaccatgtgaccttggccacatgactagaccactcggaatctcagtttcttcatctctgaaatgggagcaatgatacgaatctcccagggctctagtgagggttaaatgagatggtaggtagaaaccttccaaggcagtgcttggcattaggtcgcactgtataaatatcagaccactctgagtctaacagcaaggagaatggaacaggaagaagataaaccaggggtttgaggcaccaagaaaaataattactgcagtctgggggccccagacaatatctagacacctaccccatgcaaaatgcagtgctgagtgcttgggtactgtgcatatttgagaaacaaatcaatgtggcccctgccctcgagttgaactggcacatgggccatgtcctcagacagcctgagtgcctgtcctgccttcccaattccaagaggtatgactttgagcacttcccgggcgccccgcctcagtttccccatctataaagtggagatgataatagcattcagagtcactgatctaagggctcagggacaccattcagtgtaagccccatacactccctgcaagaggaagctggttctgactcagccctgaggctggcatctgaggcaaccacaagcccaacgtgcatggtggaaagatgactgtaagtgggggcaacctcagctggccttgggtttgaccatggaatgcgaggcacaaaggggcccattttgcatactttctcagaggctgtagggcacccctgccagggtcttacattttattgattcctctgactctactttgttggttgtttttgttgttctgatttcattgcgtgacatttttgcccatgaggtctcagttctaggaatgacagaacaaaggctccctctgggaagtcgcctgatttattggaaagggaggaacaccccacccttagggatcgctaagctcccttcctccagcttccttccccatctggcccttaggatgtgagaaaccagagctgtgacacaccagagaggagagaggctgtgccctctcaccttctgggcttcctttcctgagaaccagcccctgttctgatcttgtgagtctcctttgcctcagggagggggatgtgttggcgaggaagactcgtgcctttcatcttggactgcttctctggccctctaccccaggaaccacagaaggagacacacctgtacccggaagctggcatttccccatgggttttcccaggccagcctgttccaaacacagcttgcccccaagcctggcacttctccaaccagtcacggtttctgttctctgttgctatgaccttgagcagttcacctgcgttccttactgtctactttcccatccacctacctgcctgccctccaactttcctgatctgtgtacctaccttcctatatctacttctttttattattattatcattattctcaccctgtcttttttttaattttttttgggtgggggggacacagtcttgctttgtagcccaggctggaatgcagtggcgtgatctcagctcattataacctctgcctcccagattcaagcaattctcctgcctcagcctcccgagtagctaggattacaggcgcctgccaccatgccgagctaatttttatatttttagtagagacagggtttcatcatgttggccaggctggtctcaaactcctgacctcaagcaatccacccatctcagcttcccaaaatgctgggattataggcgtgagccactgtgcccagcctctcgccctgtcttatggtggtaatctacttctcaatttatctatttatatctactgtctacatacttatacacttatttactcatgtctacttatcagttaatccatttctctacctacctaatcacccatatatttcccatgtatttacatgtcaaagtatttccctgcattcctaccagctaagccccctttacaacaatccatcagcaggtccaggttctcatacaccctcccatgtccctccctaatttggatacatagcagttgtattctactcacctatctccctattcaccgatctctttctctccctttcttgcctcctttctttccttctcctgaatcatttatttagcacctgctagaaattatggtggactccccatccagtgctctttcaccaaaaagcatgagatgaagaaggacttttaacctagtaggggaggaatcttcatccatttggaactggaggctgccttgatcattcaaatctaaaactccattcattccttcaaatggtcttagaatagtgtatcttctattttattattttattttattttttgagacagggtcttgctctgtcgccaaggctggagcacagtggcgcaatcacagctcactacagcctcaatctcctgggctcaagacatcctcccatctcagcctcccaagtagctgggactacaggcatgcaccactatgcccggctaatttttttatttgtggtagagatgaggtctcgctatgtttcccacggctggtctcaaacttctgggctcaagcgacatacctgccttagcctcccaaagtgcagtgtgccactgcacctcgcctgataatgtgtctttcaaatgctcagtcttgtgtaggtattggggtaagtgcagaaaattaaagacctgatcctagacattaacagatgtatgatctaatcagaggtagcagagatgatgcttatgaacttgaaagttaaagttgtattgccaaataatgttgcagcaagttttgtaaaacacagcaaagcaagaaaattatagttagctggaagcgcgatgaaggtgggaactcgagctttgcaggatggctaaaatatagaccaaaagggagaaggcaggagagcagcaccgggagggagcaagctcccagcattcttccttggcttgcagggaaccaaggtgcaaaggtaggactgagcagaatctgttttgggagactgcagcaaggaccggcaatttttccagaacaactgttctttacttggaagacctagttactccccatctctccctgggacttgccaggggaccccagcatggcaaccttaatgatggttctgctgggtgctagtggttgctggcatgctagtttctgactcgagacaaataaattcagatccctagggtaagaccggcttcagcagcacctctcctgacaggggtcccgtctcaggagagaactgactttgtcccaagcagacctgggctcggggaatcctcatcacctctgcaagagttttttgttgttgctgttgttgtgttttgttgtgttttgtttttgtttttgattttttgaaatagagtctcgctctgaagcccaggctggagtgcagtggtgtgatctcggctcacttgcaacctccacctcccccaggttcaagcaattctcctgcctcagcctcccaagtaactgggattacaggcgtgcaccaccacacctggataatttttctatttttagtagagacagggtttcaccatgttggccaggctggtttcgaattcctgacctcaggtgatccgcccgcctcagtctcctaaagtgttgagattacaggcgtgagccaccacgcccggcctgcaggagtctttaagaggcaggaacaaggatgcaggtgtttcaacagagaggaagcctggggtgggcttcattcctcctcgtgctctttgcccccattcactcagtgctagaggttgtcattctgcctctgagacatccggccccctccctctccatccccacaccctcacctgccacagctgaaatccaggtgcgcctcagctcctggctgggtaccactgccactcatctgtagactctctaccctggtgccttcaggtgccaaagtgcatcctctgccatcagtcaaacacacaggttgacggatgtcacttgctctgctcagagacctgcaccgacacaggcatggtcaggttcaggtcttgtggacaagaactgggtctggaggagtcagggaagatgtagatgaggaaggtggtactgaaacgaacctctggtacagggaagatgtaccaggcagctgcagtcacccaggtgagagatggtagtcctggctggcccattctaagttccaaagctgccttggccatcggtctgagggtgggatggggggacatcagaaccagctgtctctgagaacataaagggacccccatatgggacctcaagacagctgagcagtcagaggcgcctctcccgtggcaccaggtcataggataatgagacttcttagaatttctttctttttttttcttttttttgagactgagtctcactctgtcacccacgcttgagtgcagtggcactatctaagctcactgcaacctccacctcccgggttcatgtgattctcatccctcagtctcccgagtagcacacgcaccatcacgcccaggctaatttttgtatttttagtagagaaaggattttgccacgttggccaggctggtcttcaactcctgacctcaaatgatctgcccacctcagcctcccaaaggactaggattacaggcatgagccactgtgcctggtcattcttagaatttctgacattcaccatatccgtttgttagccccactaagcaaggctgtttcaaattgactcagcatttcttatttgtcaatttctaccccactcctcacccggggacttctgaaaacagtgaaggcttcaaagtaatcaccttacaaagaagggcatcatcctcatttcacacatggggaaactgaggaccacagagaggaagtaaagaggccaaggtcacacacctgctactaagttccccgtccagtgctctttcagcaaaaatgcatgaggcacacaagtcatgtttccaaaccttcatttcagtaccaccttcatcatttttgtgttttccacataacactttactattatttatgacagggttttttttaaccactcaccttttttacttatctttcttttctttttctttaggagaggcaggatctcactctgttgcccaggctggagtgtatttcatgatcatagctcactgcagcctccaactcctgggcacactcgatcctcccacttcagcctccagagtagctgggactatagttgtgcaccatcatacatggctaatttttaaaaaatcatttgtagaaaaattagctggatgtaggagaatggcgtgaacccaggaggcggagcttgcagtgagccaagatagcgccactgcagtccagcctgggcgaaagagcgcgactccgtctcaaaaaaagaaaaaaagaaaagaaaagaaaaattagctggacatagtggcaggtgcctgtaatcccagctgctcgggaggctgaggcaggagaatcagttgaacccagaacccgggaggcggaggttgcagcgagccaagatcatgccattgcactctagcctggcaataagagtgaaactccgtctaaaaaaaaacaaaaacaaacaaaaaaaaccccaacaatttgtagacatagggtgtcactatgttgcccaggctagcctccaactcccggcttcaagcaatcctcctgcttcggcctcccaaaatgttggaattacaggcacaagccacctggcccagccatctactttatattcaaataaaactttacgtcccattataaagggaaaaaatggcaaaaacaggaggtaaccatttaacaagaaagcagagtgatgttagattatagcaagatactgttgactgtagaaggctctgaggctagagagctgctttctataaaacggagtgatcatatattagaagaggtgttaaagacatgttcacaccaagctgagacttcctccttgataccaccaggaggatgggcagagactggaaaagacactaactttctccctatgggagtcagtattatttagcatcgctttggcgggtcaccccaaaccatctgactacaagggtaccatatttgggttaacactcttttggtataatttatgttttagtccaatgtcttgggatgaaaatgacaggtgggccacttatgatctccagagaaattcagggcaatttggtgtgggagtaggcatggtagaggagagcagcatctaagaagtccccagcagaggctctcagcttgtcttgaggcatctgggcggagggctatgatactggccccatcctgcagaaggtggcagatattggcagctggcaccagtgcggttccattgtgatcatcatttctgaacgtcagactgttgaaggttcccccaacagactttctgtgcaactttctgtcttcaccaaattcagtccacagtaaggaagtgaaattaatttcagaggtgtggggagggcttaagggagtgtggtaaaattagagggtgttcagaaacagaaatctgaccgcttggggccaccttgcagggagagtttttttgatgatccctcacttgtttctttgcatgttggcttagcttggcgggctcccaactggtgactggttagtgatgaggctagtgatgaggctgtgtgcttctgagctgggcatccgaaggcatccttggggaagctgagggcacgaggaggggctgccagactccgggagctgctgcctggctgggattcctacacaatgcgttgcctggctccacgccctgctgggtcctacctgtcagagccccaaggtaaaaaggccgggaaagcatcttaatttagcgtgcagtctcagctggtcctgccattccagataaacagagaaaccattctgaattggggatgggggtgaggatgggaacaggagtctgtgtcctgctggggcaggccattggaagatgtgaaagagttgtctatttccttccaccggagggagacttcaggtcagccaggtgtctggagtatgaaccatgtatcagcaccgagaggttctagaagtcagactttcgggcagtgtgtcactaactctcagcatgctggcctggctcggcccacagcaaggtcttctcgcctccctttgggtaaatactgaggggtgcctctgcaggacgggacctctgccagactccactccatacccagagaagcagggaaaccaaaattggagtcagccttgaggtgtagctgttgagccctcagcagctggggagagctggcggatgctgccctccccccagtttcctaatggtgttgtttaaaaagggtcaggggacgggggaacagatggtgggaagagcacagtgcagacacctggcaccggctctgaaggcagcatggcagctacaccgttggctgggaagggtgtgcccctgaagaagtcgtttacattctggagtcaattttcctggagtgtacaatggacctgtgggaaagcctgtatgaaagggtaatgatgagggacctagcacagtgtccaatattttataggaactggaattgagctcataggagctcaattttattggcattgctgttgttggatggttaaaggggtggtatcccttttctcagactcccctgaaatgtatggtttgctttgaacccagagactgatgacaggtctgccggtgtggttgggtgcagccttaagttgctacgggaaagtgttggagggggagaagtcagaggtaaccttgccccctccctcaattccagatgaggaaattcaggcctgaaaagggaaagtgaccacctcaaagtctcatgccttggaggacccagcaggaatccaagacctctgaaaaggaccggcagggctcttgccacggctgggggtgtggtcatggtaacacaggttttccatccatggaaggtacctgagggattttctcttcctccctagggccagcatcagaggagtgaatagctcagttagctcatctcaggggccatgtgccctcggaggtggtttgccactttcacggttggactgagttggagagaaacagagacccacccaggggtggggacaagctccctgcaactcaggacttgcagatcacttgcccaagtggctccctagctcctggctcctggcccggggcctgggactctccccgaagtggggctggccactgtgaggaaccgactggaggcagggacctcttggatgccccaggcagttgggatgccacttctgataaagcacgtggtggccacagtaggtgcttggttgctccacagcctggcccgagctcagcgctgcagaaagaaagtgaaagggaaaaagaactgcggggaggcggggaggtaggatgaccagcggacgagctgccacagacttgccgcggccccagagctggcgggagggagaggccaccagcagcgcgcgcgggagcccggggaacagcggtaggtgaccaaagtctcctctgtaacccctaaggtcgggctgagaatcgaggctccgagactgtcagctacttgctcaaggtcacacagcaagtctgggaggatggggggatggaatatgcaaaatgtagggccgggaaacacctcgtttccagcatccccgcaacgactctgcgcgggaaccaggagccgggaacccggagcttggcttgctgtgcccagagctccggggccgtgggcgggtggcaggaaagcctggcggcagcttctgcagagaagccggagtgcagactgggagcgcggagcagacacactcccccggccacccttggccgactccgcgcgcccgggatcctgcagaggtgcgcgcccttcttgtacgccagactttggaccagggccgccgttccctgagcttcactttccctgttgggtcatattccatctctaactctggaatcttgggtattgggctctccaggcggggggccctgctcagggaggcagtagggagccaaacctttaaccagaggatgggataagtcctcaactctcgttgaacatcttggcgaaggtgtgtgttgttgggaggggtgggggagggatccccccggactgaaccgatctcttgatctctcacttctctacctcgctttggggccctgagtcacaccctctaaggagagaggctaaagcgccccggaaagccagcgtgcgaatgccggggtgggagtgggagattggatctccctggggtccaggaaagccggaatcggagccaccatgcttagcttagtctggaactcttaaaagccgcggtcctcctgagtcccacagcccctctccaccctaggtggcacaggagaggtggcaaaagcctagaagttcaaggcatggctccctccccagccgcagcctggagtgtctaactttggcaggaagtcttccgtttctgctccccactccagagaaaaaataaataaatacttctccggagtgagattaaggaaacaggtacttcttcctcttggagaaagaggagccaaaggaacttgactccaacaaatgatcaccttgcaaacccccggctcccttaggggatgacctggtctccaacaatctcagagcgtttggaggcagggtctttggagatgactgagtggggaatcccaggctccccacacatgaacatcacctgggatgatcaacctgttcaggatgtaggttcccgggctcacccccaggcccggttggctaggcctggggtgaggctgagatcctgcaggttaaaccatctatcccaggtgactccaatgttcgtttgtggggcaaaagtccctcaagtcagagacactgggaggcgctgatgtggtctcatctctttactctctccctgttacaaaacttctatcagaaaaggagtaccaggaggtgttttgttttgttttgcttaacgccacatagcaagcagtttgcagacgcaggatttgaaccctggtctactgagagcccagcccagtgcaccaagcagatgtgaacctccacaaatgcagggcaggtcccaggcagtcagagagaaacctgttgatacccagtctgtctgatggctggggcttggtttcatgtcctaagacccagcctcagataccttgagaagagcagaatcagaaattaacccaaggaaactctggattagttccaggcaatcagggaagtggctggagggaggtaggaaacttctggacttagcctcagatttgccttgagtcacactgacaagtgacttcccctctctgaggttcatctgtaaaatggataaaacatgagagcttgcttgatgatgtctgatgtgtacagaaaaagcactttagaaaaccaccaaagaatattcatgcattgggaataattattatagatcctaaagggattgtttagaaagatcagagaggggccgggagcagtggttcacacctgtaatcctagcactttgggaggccgaagcgggtggattgcttgaggccaggagttcaagaccagcctgggcaacctggagaaaccccaactctactaaaacacttttttgtgttttagccgggcatggtggtgcacacctgtaatctcaactacttgggaggctgaggcacgagaatcacttgaacccaagaggcggagtttacccgagaggtggaggttacccgagagctgagattgcaccactgcacgccagcctgggcaacagagcaagactgtctcaggaaaaaaaaaagagagagaaaaaagtcagagaggaaagcataggcagatgggaggtttccaaagaccaagacacacacagtcaaaagacagttcagaaaggggcattagttaccaccgattctcataggaaggacatagatagttttcagattccttcaatccttctgacatcaaggacaaagtctctgattttccctgatgtttgacagtgccctaatgcttgctaagatttctttttaacaaagtggtaaagaagctgagattattttagtaacattgtttctttttcaaccacaagtgatactgttggtttggttttgcttttccgtttatacatggaaaaaaaagttttctttttgtaaaatcatggtaaaatacatataacataaaatttaccattttaaccactttcaaatgtacatttcagtggcattaaatatttcaaactgttgtgcaacctccgctaccatccatctccagaactttttcatcctcccaaactgaaactctacccaataagcaataactccccactgccccttccacccagctcgtggtaactccaacttcctgtctctatgttttgggctactctagacaccgcctataaatagaattacgtgatatttgtctttttgtgcctggcttctttcacttagcataatgtcttccaggttcatccatgtcgtgccatgtgtaattcctttctatggcggaatagtattctaatatgtggatatcccatattttgttcatccattcatttgttgatagacacttgggttgttcctacctcttgactattgtgaataatcttgctaggtacatgggtggacaaatatctgtctgactccccgctttcaactctagaaagctttcttttaaaatcggtctatttaagtttctttaaaaagttaatttaagaaaaatactaaggtaaattgtagaacaggtgatatgtcaatatgaccccaaaaattgtaaagatggaagacgaatgcctgcagtttgggaaaccggatgagaggaaagacctggaagctattgtaaaatctatgctgagggtctggtgactactagaccaagggcatggcagcagagggcagctgaaagacttcaggaaggaaagatataagaattaagaaaggggcctggtgcagtggctcatgcctgtaattccatcaccttgggaggtcaaggcaggatgatggcttgagaccaggagttcaagaccagcctgggcaacagagcaagacctttttttaggaaaaaaatacataaattaataaaaataaatttttgaaaatacagattccaggccgggcatggtggctcacacctgtaaccccagcactttgggaggctgaggccggtggatcacctgggatcaggagttcgagaccagcctggacaacatggtgaaacaccgtctctcctaaaaatacaaaattagccgggtgtagtggtgcatgcctgtaatcccagctactcggtaggctggtggaggagaatcgcctgaacccaggaggcggagattgcggtgagccgagatcacaccattgcactccagcctgggcaacaagagtgaaactccgtctcaaaaaaaatgaaagaaaatacagattcctgggcccggctgcagactccctgaatagaatcactgggggtgaggcccaggacgctgtgtttttaacacccttcccaggtaattctcactcacagccaagcctgccgatggctggactccgtagtcagatctcagcaagcaggactggctcgtggttcatcttggggtctccagcacccagcagagtgctggcggggggactgtgttaagtagagccggatgggtcaggactggagtgtggggcctggctttgctaactgcagtcacaagatcctcatcactccaccccctaccccagcaccagggtcaggttcccttccaggaaaaacttgttggactcctttccaggtcattgactgcagttaggagtggcatgcagaagggaggctatctggagctgggacagaccaggcaagcggggaagggaactcttatcccaaccctgcattctggacagggaccgaaggtctcctggctgcagctcatacagctcatcttcattctcatcctgggaccaccaggcccctcacccacaataactttaccctttactggcaaatgcacaagctggagatgatggcccattcgagttttaagattttccaagttgttatgaggtcagtgtcctcaatcgggacccagagaagataggtggcttgcctgaactttcagagggggcatctgtggtgtcttttgtggggtcctgtaggatttccacgtccctcttggaggaaaaatagaagtaagttgtctcaggtcagattgtctgggaagccaagtaggagatggagatttgcatataggaggtttactggggacattcacaggagggaacacccgaaggaaaagggaagaaagcagggttgggaagcagcaggagttgaggtgcaatgcagtcacaacagaggtcttagccaatcccatagggagcactcaagctgggacagcaaggaagctagaccttcacatccctcatctacctccgtcctcccatacaggcatagcctcccccatgatgaacactcagcaccagactgatacatttgttataatcaatgaacctacattgatgcatcattattacccaaggtccatggtttgtttacatgagggtttactcttggtgttgtacattctgtgggtttggacagatacatgatgtaatgtatatgacattatagtatcacacagactcatttcacttgtgactgagcttgtccttctttctttaacctgcctccaactgctgagaagccctttggctagggattgcagccaattttaatttgttttccactttcctgctctgaagttactttgtttgccagaggctggttggttcaaacccaaagggcagggagctgcaatggaaatccattcaacggtgctggaattgggatggcaaaaaggagcagcaggcaggtgtcagcagggagcagctctttgcatcccacagttcccagggagcttaccattctttcattcattcattcatcctttcatttatgagacaaagtctcactctgttgcccaggttggagtgcagtggcacagtcattgctcactgcagcctcaagctcctgagctcaagccatcctcctgcctcagcctcccaagtagccgagactacaagggcactccaccacacccagctaatttttgtatcttttatttctgaagagatggggtttcactatgttgcccaggctggtctcaaactcctggcctcaagtcatcctccctcctcagcctcccaaagtgctgggattacaggtgtgatctcagacagcttacctcttaatcacctttccatctgagctggcagcagagctgggaaagtgcacccaacaccccagatgctgcaactttagtgcttcctgctccttctctgtgtggaactggcctgtttgggtacccagggccagtcccctccaagaccctctgtagaaaaagaccctactgtacacctcaattccattgcaggacaggacataattgaatcctgcctctccctgccccagtcacccatccctcccaagccattatcttgggacctgcaagggcctccaagccaagggtggcaaatccaaataccaaaggggccataatgatgtaaaatgtgtccaggcagaaggcaatagggagtagtggggcctctggtaacaattgtgtgtactctatatagagacattgtgatggtgatttagacacacacacacttatattggcttgggaaacaaaacaaataggcctatcgactggattcaacttttgattttgcagccaagcccctgtggcacagctgaggagcttgcaggtcagaaaggggatttagagccaaccaatagcaatatctccagacctctcctgacacgaagctcatctgacctcctgcccccattacacacatacacatgcacacacatgcatgcaggcacatgcacgcacgtcttctagtctccctgccttgaggacaaatgatcagatcctgcaactgtttccaggcccataagcccctgagcattgcagtgttgctacatgccttagtttcctctccgtctcctgtgacctcctcgtgccactccaggaagtgaaagtcttgagtgagaccagtagtttctcttaagtcctctctctgtctcgttctcctgggatatttacacttggtttgcaaacagcaggctggagagtgaggggcttcttcctctacatccagctcctcccccatcctgctccaagtccagcatgttcctatctcttccccaggaccctgggctcttgggcacaaatcaagccatcaccagacagcctgtggggtggcaagagcagaggtttgtttctttgtgaacatctataggtaccaggctctgtgcaggccctattgttggtgagccatagaggtaccaacctcaccccatgaatcctcctttgtttcttttcttttcaacccctgggcctttaaaccttcgattaactgcccagtgcagcccaggtcatggtacactatgatctttggttcacatgagggttttctcttcattaatgtccctatttcccatactgggtgcccattctaatgcatttcaggtgtatctttctgtttgtatgtgctcttataaaacatgttttgcctttttttttttttttttagatggagtctcactctgtcacccaggctgagttttctatttttagtagagatggggttttaccaccttggccaggctggtctcaaactcctgacctcaggtgatccacccgcctcggcctcccaaagtgctggaattacaggtgcgagtcaccacgcctggccacagtttcttacttttgcattctgtactatgtttttaggatctacttgccttgcttctgatgcatttgatctttgcttctaatcacggacattgttctctatggagtgcaggggttacttttcacctgtccacacccccagtgatggacacctaggtgacctccaactctctgtcaccacaaataacacagcagtaaccatcctcagatgggttctcctggggagttgtgggaacatttcttcaggatatatagacccaagagctgaattgccaggtggtaggatctacatatccttagatattctacatgatgccaggtcgttctccagagcggccccatccatctacattcccacaaacccgtgtaaccaacacttggcatttcccagatgtctaacttttgccagttgtacagtatcaagtgtcactttgctgttttatttttggagtttacatcttagtaccacttactcgctaagtcactttaggtaagtcacaacaacccagtgacataagcactgtgccaacaaaatgcagtcgattctgtgactcagagaggttgagtaacatttgcaaagtcacacagcaagtgtggaactaagatttgaacccagagcctgcacccttaaccactatgctattattatgttttgtctctctcctaaaatatcatctgggtctacattgcaagcctctttggcagggactgtgtggtaaacctctttggggccagtaaggaactgagctcagtgactttcttacggggtgctcagtgaatcattgttttacagctttagaggggaaaagtgagagatgtttcttagagtttatctggaggactacagggtgcatgagcaaaagcggaactcatttgagctactacccccacaaagaagctgtttggggtctggtcatggtagataggcattcctaggcccctggcttcccaacaccatttggcccccggaagcagcttgtcatgaggttggggagcaggttggtgttggggggggccttgggggaaaggaaaaggagaagactgccaggcaacgaggaatcagaatctcaaaaagactcaattgaaggggctccaacactcgttgaaacggaggctcagagggctaaggtaatgtactcaggatcaaaggcagagcagaaactcaaaccatgtctctaggcacacagttcagaggtcttcccattattcctcaggaggagaagttcatggtcaagagtagggaagtattccttctcaagcttttttttttttgtctgagacagagtcttgctctgtcaccgaggctggagtgcagtggcgtgatctcggctcactgcaacctccgcctcccaggttcaagcaattttcctgcctcagcctcccaagtagctgggattataggcacccaccaccacgcccagctcatttttgtatttttgcagagacggggtttcaccatgctggtcaggctggtcttgaactcctgacctcaagtaatccgccagcctcggcctctcaaagtgctaggattataggcgtgagccaccacccctggcctccttctcatgctctttaatcacagttcagagcagtgctggaggcttttaggggtagcaaaagagccttcttctccctttcagtgcctccttagaccctcaaagatagactccccgcctctgggaagaaaacatctaatgaactggacgtaatctcagcgcctgcgtctgtaaaatggctataataacaacaatctcccagagttgccgttaacagttgaaacagaatagtaaatgcaaggcatctagcacagccccagacacagagaaatctcccctggtcactctcacagaggtaagaagcacattaataataaaaatggtcatcacgcatattgtactcaccatgcagaagttgtgctgccttaagctactgttcattgagcacttactggtcgccagtcccctttctaagggctccatgcaacttaactcccctaatcctatgagttgccaattattatcccccactttacagataaggaaactgaggctccaagtggtttaaaaaatgaacttacccagattgtagtgcgttggtaggtagggataacctgaaagttgggaaatttcaccccaaagctcaccatctgagctccattcatctcccaccagctgagatggaacgttatgctgttcccagaagagatgcatgcactgatcttcagatagtttaagtctgagttagaacattctggcgacacctgatttccctcgggggagagagaggtgaattgttatttcagacacctgtttagtgtctacacttagcctttcaaatcctgcatgcagtgtgaagtggggatgaaaataaaccccaaaaaggacttttgatggcaaaaagatcaggaatattttctcgagttggatgtggaaggtggtggcccagggggaagcacagtttcaaagaggaccttctaaaaatactgcccatttaccaaaaagacacagaccgcacctctgccctgcccccacatggctcctcaaaaggagaaattgtcttgccacccacgccttccctcgccggggtgctggggggccaacagcaattcaaaaaggctatagagtgggctgagactttggagatgggtagtttggttcaaatctcagcccactaatccctctgagcctgtctcttcatctgaaaaacaggaatacaaatagctgatgtgtaagttagaccaaatggggtaatgcctacgagtcatgtcatttggtacctggcacttgctggacactgtgaattctagttctatatcattgccacggatgaagagaggctgccatgcgcagaaacatgctgagagctgggagaaggtgagctagagggatacagtccctgccctcagggagagctgaagggctctctctcctgccacgggatgatcagggccatcttttccctccatcccgctctggcaatgtggtttggagaaacagtccaatgaaggggcctttgaagcacttcctaagcatctatagacataggaaacttggctctggggatagaggaaggtcccatgccaagattcaagtagatcttggtgtgactgggaggcagctgtggcgttgtggggaaacctagagtcttgggcctgaatttcagctttgacaccctctaatgtaatgggcttcctttgactgtaggcttcccacatagctggcaccccacacagaactcccttggccttctgatgatcctgcaggacaatcttttttgttttttgttttttgttttttttttgagatggtatctcactttgtcgcccaggctggagtgcagtggcgcagtcttggttcactgcagcctctgcctcccaggttcaagcgattctcctgcctcagcctcccaagtagctgggattacagaagcacgccaccatgcctggctaattttgtatttttagtagagacgggatttcaccatgttgcccgggctggtctcaaactcctgacctcaagtgatctgcctgcctcggcctcccacagtggtgggctgcaaggcaatcttcattctccagaactaatattgggaaaactgatgttcagagaggtcaagtgacttggctaaggcatcacagccagaattcagatgcaagctcctaaaccacatgaccttggacaagccatttcactgaggcgtgtgaacctcctctaagctcaaatgggcataacactctaccctgccttttccccagagctttttgggaactcagatggtgtggaggatggaggcagaagtccactgtgagctgcaaatccttgatcacccaagaggaagtgcttaaggtgcaggcttcagtcttagggaagcaggaagtggggcgctgaaatgtgtattgggggcttctgggagggggtttcttcttgtccaggttgagccaatgacgcagatcttaggccctctggtgactttttgcccaggcaacttctcagtggtggtgatggggagcgtggccagaccatccaagctgccctgctggctgtgggggccttttttttttttctgagacacagtctggctctatcacccaggctggagtgcagtggtgcaatctcagttcactgcagccttgacacctccccaggctcaagctatcctcccacctcagcctcctgagtagctggttctacagatgcacatcaccacgcccagctaagttttgtgttatttgtagagatagggcttcgccatgttgcccaggctggtctcaaactcctggactgaggtgatactcctgccttggactcccaaagtgctggaatttctacagatgtgagccaccatgcccggcctatggggcccttcttgttcttatgaagtctgcagggtccccttatgcaaaagaacagaaagctcggcttcacaaagtttgacctcggaagaaatggaagggaaagggtccctttgtcactctcacaaacgtaagaagcaaactaataatgatggccatcacacatattatactcaccatgtagaagctgtgctgccttaaacttctgttcattcagcagttactgattgccagtcccattgctaagggctccgcgtgacttaactcccctaatccttgtgagttgccaattattattcgcattttatagatatggaaactgaggctccaagtggtttaaaaaatgaacttgcccaggttacagtgtgttggtaggtaggggtagtctcaaagttggtaaattttacgccaaagctcacgatacttgccttctttcccttctcaatttatttctctgactgtgtgcttaaccacacagcagtgtcatccagagtttgaagcagagctcatcaataagtgggggtgggctaaatgtctccaggctcctcccttgcggtccctcccaccatcccccatctgtgataccacctgtgtctctatgcttgagcccagacaggacaagggtgatcatttcattgggaacattttgactggggggaaagagcaccagcctgggagtcttggcggggggagtgggggagaaggggcaggggcagccaccgacaggctatgaggtcttgtgcaagtcacgtccttcccggggtctcagtcttgtcatctgcagagtgaaggaaagaggtcaagcttgaaggtccctggcagacccaatgccctgtgagaaaactgagtttgggtaacttattattttatagatatggaattatcttatagaaatgttatagatatggaatcattttatagatatggcccaaagtccaaagtcacacaactcattcacggagttgctaggatcagtctggagctcttgtcacgagatcacactgcctcaaagaggaggcagattgctgcaatgtaggttcttaataaagagcatgggtggaatgggaggcgggcatcaggcaggagctggggcaaaggtgtcttttctcactgctctgagagaacagattttgtgcctgtgtccctgaccaaggggctgggagaggtggagcatctcacccccaaccatctcccagctttggccctgctccaggaaaagggcggtggccccatctttcagttctgcttcctctagtcatggttggctgggatctcgctgcaagccggttatgtttgggttcctgcagcccccgctcaaccgtcatgaacaagtgggcccagccagtgccccagcttggactggaaagatcattctctgtgacatccgggggtctgtgctgagcctctccccaggcagtgaaagctgtggatgcgtgaaagaaaatgggtctctgggccgggtgtggtggctcacacctgtaatcccagcactttgggaggccaaggcgggtggatcacctgaggtcgggagttcgaaaccagcctgaccaacatggtgaaaccccatctttactaaaaataaaaaaattagccaggcatggtggcgggtgcctgtaatgccagctacttgggaggttgaagcaggagaattgcttgaatccgggaggcagaggttgcagtgagccaagattgcaccactgcactccagcctgggcgacagagtgagactctgtctcaaaaaaaaaaagaaaaagaaaatgagtctcaggaatggggtggcaagttgagtgtgtgttttctcatgagcttactcttcaatgtattctcttctgggcccagaacagggcagtaggagcctccctctggtcttccagcttcagggccagctctcctcttacctcctccaggaagctccctctgtttctttccagccttcatctgcatgtcatgtgtggtgggttgaaaggtggccccccaaaagatatgtccatgtcaaatccctggaacctgtcagtgtgactttatttgggaaaagggtctttgcagatagaattaagttaaggggctgggtgcagtggctcatgcctgtaatcccagcactttgggaagctgagattggaggatcacctgaggtcaggagttcaagaccagtgtggccaacatggcaaaaccccatttctactaaaaatacaaaaattagctggtcatggtggtgagcacctgtaatcccagctactcaggagactggggcaggagaatcgcttgaactgggaggtggaggttgcagtgagccgatacagcgccactgcattccagcctgggcaacagagcaagcctctgtctcaaaagaaggcaaaaaaagaattaaagatcttgaaatgacatcatcctggattatctaggtgggtcctaaatccaatgacaagtgtctttataagagaaagagacttgctacatgaggagtaggtgatgtggccactaaagctgagtttagagtgatgcagccacaagaccacaagtcaaggatcaccagtagttcccagcagctagaggaggcaaggaagcattctcccctcgagcctccagaggcagcgtggccctgctgacaccttggcttcaacttctggcctccagaaccatgagagaataaagtgctgttgttctgagctacctggatgctggtaccttgtttcagcagccctgggaaatgaatataccatggaaacatggacctgaaccacggatcctggcaggggccttagagccacacagatgagccttcagcttggctttccccagcaagagctacatgatcttgaggaagctgcttgtcttctctgggtctcaagttcttcatctgccaatggagacaataatgcttacttcctaggttttaacagctttattgagatgtaattcacatatacaatttgcccacttaaaaagtacagttcatgcctgtaatcccaacactttgggaggccgaggagacaggcggatcacttgaggtcaggagtttgagaacagcctggccaaaatggtgaaacactgtctctactaaaaatgcaaaaattagccgggtgtggtggtgggtgcctgtaatcccagctgctcaggaggctgaggcagaagaatggcttgaacctgggaggcagaggttgcagtgagccaagattgcacccctgcactccagcctgggtgacagagactccgtcttaaaaaaaaaaaaaaaaaaaaaaaaaaagtagagttcagtgttcttttgggaatactcagagagttgtgtgaccatctcccatccccacagtcaattttagcacatttcatcaccccctaaagaaactccagacccatcagcagttgttccccatttccttccaaaatccctctctgccaagccctaggcaaccactaatatgctttctttacttaaaaaaaaattaatagagataggcttttgctatgttgcccaggctggtcttgaacacctgggctcaagcgattctcctgtctcagcctcccaaagtgctgggatttcaggcatgagccaccacgccccacccctcctactttatgtctccatggatttgcctgttttggtcatttcaaataaatagaatcatacaatatgtgaccctttgtgtccggcttcttcacttagcattttttttaaggttcatccatgttccagcatgtatcagtactttctccctttaatggtggaatactttattgtatagataagcaacattttgtttatccatttattttttggtggatatttgggctgtttttatattttggctattttgaattatccttctgtgaacattcgtgtataggtttttgtgtggatatatctggtttttcttgttttcttttgttttattaatacataatatgatacatatttatggggtatatgtgaatatttattacatgcatagaatgtataatgatcatgtcaggatatttgaggtatccacatttgggattgtttaaagattaaatgaaatagtgttaaaagtatttaatatgcccttcaacaaatgatgaggaaatcttagaatctgctcagactccttcagtttacatattaggaaactgaggcacagaaaggagcagagacttgctcaagtccacccaaagcagtagagcattgtggttaaatgcaggacttcagtcagactgtctgggttcaaatcctggttccacttggacatgggtttccttacataaatcacttcacctctctgagcctcagttttctcatatgcaaagtgaggataataataataccttccttacatggttactgatatgagtattaaatgtgccagctcatgtgcctggcgtataggaggtgctttataaaccttagctgttaccactcatggcattgccaaatgtgggacgggtctcctgactctctggtgtgagattgatggaatccacactttccagttcccttttctacctcctgggtatcttctcatatggttgtaagttccctggaggaagggaatgtggcttgctctctccaccacgctgagcatataagaggtgctgaatgagcgcttttattcactcctctcatccccagccctcaccagctgggagttgttgtaggtgtcaattttctgcctctttccaacaccctgtgaggtgactgagcattgtcttccctcccaggcagctcacagtgtgccaccatggagttggggcccctagaaggtggctacctggagcttcttaacagcgatgctgaccccctgtgcctctaccacttctatgaccagatggacctggctggagaagaagagattgagctctactcaggtgggccctcctccctctggtctcttccggtatcccccacccctcagcttgctgtagagacggcaatcaggggaaattctggtccctgtcctcccgtcagcaccacggacagctcccacgtctgtgggacgctctctgcagatggggatgatctcccagccctgccccgcctctccctcgttccccaccagccctctttccagaaatttccttcttcatccaagggacttttcctcccagaacccgacacagacaccatcaactgcgaccagttcagcaggctgttgtgtgacatggaaggtgatgaagagaccagggaggcttatgccaatatcggtgaggaagcacctgagcccagaaaaggacaatcaagggcaagagttctttgctgccacttgtcaatatcacccattcatcatgagccacgtcagtcccctcccacagaaatcattgcaagggggatgcggagcaatggctggaggaacggagactccagggaagagaggggagatggaggccagtgggggaaataggccccttcactaatgaccaccaagaaaacaaaatctcatgtttacatcctccacctccatttctatacgcatttctgcttcttgctcttctgtccatcctttctacaaagcccataccatacacccctttcccttttcctcccagctccttagccaagctactctagtatttgtaataactagcatttactggatactcatagtatgctcattgctgtccatacattatcatctggaatccttacaacaacaaaggaaatacatattattagtttctgtcttttacaaatgaggaaattgaggtttagagaggtgaaacgacctacccaagtttgcattagagatagtaatgtacagatctgaaattctaacctaggtctttctcgtttcaaagtctccatttttaaccacaaaaaaagaaagtgtctggggttggaagatttgctaaggcttaagcagagaagctaatttgtagccttaagaagagctacagctttcagacaagggcaggactcttggggagaggtggtggtggtgttgctgctagtggtttgttttttgggggagagacgtgggatagagaatctcttctcaccagcatcaccaccacctcatacagagcctatgttgaaatagaaaaaagtggcctttttctggaggatgcagcccctaccaggaagtaactgcttggctagcaaagtgcaagccggagtcctgcccccattttccttgttggcttgggcacctgtgtgcagtgaacaacctgcaaaactcttcttagtggtcttcttcctgccaacccaggaacagcagcattcagcagttctgtgcttgatccaaatgtggccaatttttccccagagcacagtgtattgaaaatcataccaaggaagaaaatggaggggactagtaattgttcatgtttcagaaattacagaactgagagcttgactgcttccttcccttcctggggatttacatgggggaagcagaagtgattggggctgaggacattcacatttcctcacaactggaggcagtcattaaggatttgggcatgtcataggatttgggtgtttttctccccccttagtggcatctccacaggcagcgaaagctgtctaagcaaataggtgaggcagtgcgttagtccattttttgttgcttaaaacaacatacctgacactgagtaatttataaagaaaaaaaatatttcttacagttatggaggctgagaagtccaaggttaggggctgcatctggtgagggccttcttactggtgaggactctctgcagagtcccaaggcagtgtggggcatcacgaggcaagaggtttcggtgtgatagtctctcttcctcttctcataaaaccactagtcttactcccacgacaacccattaacttattaacctgtttatccactaatccatgaacggattaacccattcatcaaggaaaagccccagtcacctcttaaaggccccacctctcaatactgccacataggggattacatttatacatgagttttggagaagacaaacattcacgtcataacaggcagcttcacccaagtctgctcctcaagtctgtgggttttctctctgcttctggaaggtgaagcccaggcctgggcaagtattcttttgcagcatcctgaaatatgaccttagcttctaaatgtgtaaaatggagataataatcacacccaccatcacgggatggttgtaagactgaataagttacaatgtgtaaagcatttagaaaaggaatttgcacagagtaagcattcagtagatgataggtactaccccacaaccaccgttatcattattatcaccatcattattatcatcttcattttcatcaccttcattatggccatcattccattcctcagctcagaagccttctatggctccccattgcttataaaatcaagtcctaactttccccagcatgaaacttctaccaccgtcacctatctctcagggtttcctaaacatactctgaacaagtttcctcactctgccactgtgacccagaaagctatctgttctccttctcccagactctgcctcatctttcaaggcctggttccaggatcccttcctccaggaagccttccctgattgccctattccaccatacaccttttttctcggacttcatgtcatggtgcctatattccaagggctctgagccatgtacccctttatatagttaccactatttactgagtgcctactgtataccagctactgtgttggatgctctagatgtagaacctctaattatcaccatcgattcctgggtagtaggcattatttattcatcttacacagatgagaaaatggaggcccacagtggttaaataactagcccaagattgcacagctagtagggctagtggaaagtagaggtggaatttgaactcaaatcctgcagtaactctaccattctgccttgctcttctttgtagcagtagataagttttcatggatacatacctcatccttttgattagattaagggcccctggagtgtcagtgttcattcatttgtttgatcattcattcattcaacaaacatttcttgagtccccactgtgtgccaggcccagaggttccccagcccaaggcctggcacacagtgggccttcagttagaccttgttgattgactgcgcttttccttgtctgggcagcggaactggaccagtatgtcttccaggactcccagctggagggcctgagcaaggacattttcagtaagtttgtggtgggtggggaggtcttggctcagcctgcatttcctgccttgttccctggggggtgccctaatacctgacgaccattcattgatgggcagtcagacccctctccccaaggtgggtacaatagagactcaccttgggctttcattgattgtgtgagttggtctctggtttttctcaaagtagagcacataggaccagatgaagtgatcggtgagagtatggagatgccagcagaagttgggcagaaaagtcagaaaagacgtgagtgagcccctccctgatccaacctagccttgcttgagacctggcctttccttgactccaaagcctgctgtgggtccaacttgcttccctcgctaagtcctgtctggttgggaggccctttaaaagccaacaggagccttaaaatgtacatctgattatttcatggccctgataaccctccaatggctacaaaatacatgccacaaggcctgtatggcccttcctccctctccaaacccactatgagacaccacacttcagccaccaccagcttctccactcctataacccatgtgccctttcaagcctcggggcctttgcagttgctatagtctctatctggaatgcccttcccccagttcttcccatggctgactcctttgaatctttctggtgttggctaaactgtcacctcttcctggaacccttctctgaccatccttccatgtagattagctcagttattctcaccttgtgtgtctttttccttgcagtttagcactcattaccatctggacatattttacgccttgctctcccactgtgaggacagggaccttgtctttcttgctcgtgactgtttccccagcatctagtgcagtgcctggtatgcagtagcacctcaatagatatctgttgaatgaaaacatctgtaaaatgggtgtaacagttaactgagtacttattatgggtctgaccatgtgtaagtcctgtatctatttattcagttcttaaacaggtgaatcgcacacagggtatgagattttaaaagtgcaaagaatattcagtgaaggctgggcgcagcggctcacacctgtaatcccagcagtttgggaggccaagggggacggatcacttgaggtcaggagtttgatacctgcctggccaacatggtgaaaccgcgtctctaccaaaaaatacaaaaattagccgggtgtggtggtgcacgcctgtaatcccagctactcgggaggctgaggcaggagaatcgcttgaacccaggaggtggaggttgcagtgagctaagatcacgccactgcactccagcctgggtggcagagtaagactctgtctcaaacaacaacaaccaaaagaatattcagtgaaaaaaaaatctccctcccactcctgttctgtagtccctcagttttgctcctatcttagtcaacctatgtgaccagcttcctttttgccttgtcagaaataaagcgagctcctgtatttgctttaattttccatgcaaatgaccacattttatttacactattctgcattttgctttcttcatttacttcattactccctgtctgggaggtcacgttccatattattgagggagaggacacggtcctatcttcagcagnnnnnnnnnnnnnnnnnnnnnnnnnnnnnnnnnnnnnnnnnnnnnnnnnnnnnnnnnnnnnnnnnnnnnnnnnnnnnnnnnnnnnnnnnnnnnnnnnnnnnnnnnnnnnnnnnnnnnnnnnnnnnnnnnnnnnncacggtcctatcttcagcagcttctttattttctttcttttcttgtttttcttctttatgttttcatttgataaatatttccccccaagattttattgtgaaagttttcggccaggcgtggtggctcacatctgtaatcccagcactttgggaggccaaggctggcagatcacctgaggtcaagagtttgagaccagcctggccaacatggtgaaaccccatctctactaaaaatacaaaaattagccaggcgtggtggcgaacacctgtaatcccagctaccagggaggctagggtgggagaatcgcttgaacctaagaagcagaggttgcagtgagccaagattgcgccagtgcactccagcctgggcaacagagctagactctgtttcaaaaaaaaaaaaaaatgttttcaagatacaataaaagtgaaagaatggtactatgaaggtccatatacccaccatgtaccattttgattctacaattaatgttgggttttattcatcttatcacatctctattcatctgtccatccctctatccatccacacacccattcattatatttttggtacatttcaatgtacatttcaaacgtaaattgcagatttacactcccctcgtgtacttcagcatcctttcttttaaggccatgcagtgtttcgttgggtagatgaaccataatttgtttaagcagtcccttgctaagggacacgtgggtttttaatctgttgctgtgagtgcttgatactcactcactgatttctggcatactcctgcaatgtaggaaccaccacccccatttcatagatgtgagatcaaaggttcagagaagctgcattgcaaaggcacacagctaggaagcggttcaaaagcaggttcctttgttttgttttgttttgttttttggctcaaacccatgttgtgtccccatttgtgactcggcctcttctgctgctacactgcctggtatggtttgagatggggtttgggttcaagccaaggagctggggttggaatgttagagcgaggggaggaaaatggacccccaagaccactacccagccttgaagttaaggccgtatagcctgctagagtcctgagccccttctggcttgggacatcctctccctggggcagctgatcacatgttttctctgcagccttcccagaggagcttccggcagacctgaagcactggaagccaggtgtgcagggcaggtgggctggggttgggaagggtggatgccttggggaggggatggaagagattgaactcctggcccaagtctgatggggatggtgcatggtgcagcccctgcccttctttgggtagaggctgagagcttggggtcccttagagtcctctaaggggctcacgactgtttgtggaaggtggtaggggcttggagctaacagattgttcataggttctattctgccccagctctccgtgtggaggccctagggtcctgctcagcatagctctcagagccaagtcacaaggagaggactgggggactgcctggcacagagcagttgctgatcaacacagctgcagccagggctgagaagatgacaagcatttcctctgtcaggagagacatccatgccactccagggccctccccatcccaggaaggcccctccaagcacccagtctctaacacagcccacttcctcacagctgagccccccactgtggtgactggcagtctcctagtgggaccagtgagcgactgctccaccctgccctgcctgccactgcctgcgctgttcaaccaggagccagcctccggccagatgcgcctggagaaaaccgaccagattcccagtatgttagggggcttggagagagtgggctttctccctcttgggaggtggataaggagttgacactaaggcagggactgtcaggaactggacctcacctctccccaaccctatcagtgtcactcacctctgccccagccagttttatccttggggcccccgtcagctcaatccctggcagagaacatgcctcagaaggaaacacatccgtgcgagcatcaggagggaatctccaccaattagagcattcacctgccagccttattcgttcatcagctcttcatggagcccgttctctgtgccaactgctctgctaggtgctaagaattccatcagggcaggacagaaacagctactgctcttagggaaattagggccctttaggggggtcagacattaatcaaataagcaaaagcagaatcgcaaacacaggtgctatgcaagatcccacctcactgcctttgtctcttgcagtgcctttctccagttcctcgttgagctgcctgaatctccctgagggacccatccagtttgtccccaccatctccactctgccccatgggctctggcaaatctctgaggctggaacaggggtctccagtatattcatctaccatggtgagtgcggggcctggctccccgaccacctctccctcctacctgactgctccctgacctcatcctccccatactccatgcacttggcagtggtgccctagcaccttctcatgatcctccctccccagcacaactttctctgtccctatttcccaaaaatcaaagcagaagagcagagattcctgaggtggtctgggtgcatgaccaagagtggttgtgtggccttccatatgttgctttccccttctgacccttagtttttccttattttttttaaatgtttttgtttttaaattgcaacatcaatacatgctcactaataagctaatgacaagtgatgtttacaagaattcactgtctctctcactcttttagtatactgatgtgaatagtttggtgtgcatccttgcatagctttctctgatttgtcttgtttcctaatcagtaaaatggtccctactgacccaccacactgaggggttgtgacttgtctcagggaaggtgtgttttggctgtcagggatgagaccaggaggatgcttccactcaagtccagagcatccattcctggttgcaagacagtttcagtataacgcactggtatctcagaagcagagaagcagttcctgatgtctaggaaaatgagcactgaccacacagcaggaagagtgcaatagtagtacctgccctaagttccttatgagctaattgcacccatttcacagattggaaaagcaaggttccaggagctagatgtaactccagagctctttcttcagctctgtcctgaaatatcttcctttggaagttctactctcttctctccagacttcctgagctccacagcccagtttggagtaggggtgacccaagtgcatttctggaatcaatacctggttattctcacaccactctccacccccaatgtaggtgaggtgccccaggccagccaagtaccccctcccagtggattcactgtccacggcctcccaacatctccagaccggccaggctccaccagccccttcgctccatcagccactgacctgcccagcatgcctgaacctgccctgacctcccgagcaaacatgacaggtaaggacccttagggcctgtgagaggtactagaagcaggatcgaggccctggggaaggaattgtctcaaataagatccacaagcaaagctgcctgtagggacaacaggtcatgtttaggggtcagtcgggacagggagggtctccagggagtggaggcatggttgtgggggaatggacagctagagaatccacatcccatccaaatacagccatcagccttcagctgcttgttacccagcagaaaagccagacaatgtggtcagatcttttgaagttgaaaaccctgatttttacatagatattgtgattttttaatttttattttattatttatttattgttgagatggagtctcactctgttgcccaggctagagtgcagtggtgcgatctcagatcactgcaacctccgccctacaggttcaagtgattctcctgcctcagcctccggagcagctggaattacaggtgtgcaccgtcacacccagccaatttttgtaatttcagtagagacaagtttaaccatgttggccaggctggtctcgaactcctgatctcaagtgatccacctgcctcgacctcccaaagtgctgggattacaggtgtgagccactgcacccagcctgatattgcgattttcttttttaaacatgagtgaaatttttaaaagtacagttggccaaagaaagacatatttgagttagatacagcctcaggccgctatcttataacctccatcttgggaaactcagcccatgaaggctgtaaggactaagtggcccagagggaggggggtccccaggggtaaccctcaccctaaatctggcacctgcttctccatctccagagcacaagacgtcccccacccaatgcccggcagctggagaggtctccaacaagcttccaaaatggcctggtgagtgatgcgggatctctctgccctgggtggtggagatggaagcccatatctggcttcacattgctcattcacttgacacttattcaaccccttctttgttggctcacacactcatttatttattcattcattcattcattcacttatttgattatgccatcatttcaccattcactccaccactccctcaaataatatttattgcccttcaataagcctgcactgggtgttaacacttcattgtcaggctgagagaatgaatgaggggcaagcgaatgatgaagtgagtgagtggatgaagtgagaagttgatgaggatgggagcaatggaaagtgggaataaaccagtgaataagagaattactaaattactaaatgcttactctcacatactggtctaagcatgttaggtatgctaaatcattaacatctcacacaatcccaatattatccccattttccagatgaggctactgaggcatggtgggatgtatagcatgctcagaattgctccagcaagtggtagaaccgggatttgaacccagacacgtgggctccactgtcttaactcttaacactccctcccatgacctccccatggtgagtgagtagtgatcaagcgaagaaaaagcttagtgagtaaatgaaggaatgagaaaagatggccatgcatggtgccttatgcctgtaatcccagcactttgggaggccaaggcaggtggatcacctgaggtcaggagttcgagaccagcctggccaacatagtgaaaccccgtctccattaaaaaatacaaaaattagccagacgtggtagtgggtgcctgtaatcccagctacttggcaggccgaggcaggagaatcgcctaaacccaggaggtggaggttgccgtgagctgagattgcgccagtgcactccagcctggggcacagggcaggatccatctcaaaaaaaaaaaagagagaaaaggtctaaaaggagtggacacttaaacaagagagaggatgagtgaaggaatgggtgtggaaatgagtgaactaatgaatgagtggtgggtgactgaatgaagcaaatgatgaagactgtatgggggccagatgtggtggctcacacctgtaatcccagcactttgggaggccaaggcggaacgattgcttgagcccaggagctcaagaccagcctgggcaaaatagtgagaacttatctccacaaaaaaacaaaaaagaaaaattagccaggcatggcagtgggcgcctgtagtccccagctactcaggaggctgaggtgggaggattgcttgagcctgtgaggttgaagctgtcgtggaccatgattgtgccattgcacgccagcctgggcgacatagtgagaccccatctctacaaaaaaatcaaaaaattatctgggcatggtgtcacatgtctgtggtcccagctacttgggaggtggagtcaggaggatcgcatgagcccaggaggttgaggttgcagcgagctgtgatcacaccactgcattccagcctgggcaaaaaagccagaccctgtctcaaaacaaaacaaaacaaacaaacaaaaaaactgtgtggggaacagatgtaaatgatggtggcagtgctggccttgtggtggctggccctggccctgcctctcacatacccccaccctgacacgcccctggcctttgcagagccggtggagcagttctaccgctcactgcaggacacgtatggtgccgagcccgcaggcccggatggcatcctagtggaggtggatctggtgcaggccaggctggagaggagcagcagcaagagcctggagcgggaactggccaccccggactgggcagaacggcagctggcccaaggaggcctggctgaggtgctgttggctgccaaggagcaccggcggccgcgtgagacacgagtgattgctgtgctgggcaaagctggtcagggcaagagctattgggctggggcagtgagccgggcctgggcttgtggccggcttccccagtacgactttgtcttctctgtcccctgccattgcttgaaccgtccgggggatgcctatggcctgcaggatctgctcttctccctgggcccacagccactcgtggcggccgatgaggttttcagccacatcttgaagagacctgaccgcgttctgctcatcctagacggcttcgaggagctggaagcgcaagatggcttcctgcacagcacgtgcggaccggcaccggcggagccctgctccctccgggggctgctggccggccttttccagaagaagctgctccgaggttgcaccctcctcctcacagcccggccccggggccgcctggtccagagcctgagcaaggccgacgccctatttgagctgtccggcttctccatggagcaggcccaggcatacgtgatgcgctactttgagagctcagggatgacagagcaccaagacagagccctgacgctcctccgggaccggccacttcttctcagtcacagccacagccctactttgtgccgggcagtgtgccagctctcagaggccctgctggagcttggggaggacgccaagctgccctccacgctcacgggactctatgtcggcctgctgggccgtgcagccctcgacagcccccccggggccctggcagagctggccaagctggcctgggagctgggccgcagacatcaaagtaccctacaggaggaccagttcccatccgcagacgtgaggacctgggcgatggccaaaggcttagtccaacacccaccgcgggccgcagagtccgagctggccttccccagcttcctcctgcaatgcttcctgggggccctgtggctggctctgagtggcgaaatcaaggacaaggagctcccgcagtacctagcattgaccccaaggaagaagaggccctatgacaactggctggagggcgtgccacgctttctggctgggctgatcttccagcctcccgcccgctgcctgggagccctactcgggccatcggcggctgcctcggtggacaggaagcagaaggtgcttgcgaggtacctgaagcggctgcagccagggacactgcgggcgcggcagctgctggagctgctgcactgcgcccacgaggccgaggaggctggaatttggcagcacgtggtacaggagctccccggccgcctctcttttctgggcacccgcctcacgcctcctgatgcacatgtactgggcaaggccttggaggcggcgggccaagacttctccctggacctccgcagcactggcatttgcccctctggattggggagcctcgtgggactcagctgtgtcacccgtttcaggtggggtgaggggcttggggaagagacatccttgtgttgggcattaactgcggtcttggtgccaagcccagtgctctgtggggtctcttttagtatgcagagcagccgggtggggcagaatggattgtctccatttttaagatgaggatgttgaggctcagagaggggcagccacttgccacacagcaagtgagaggcaatggcattctcccagtcaatatttgaaggcccgccatgtgccagtcactggggtatgtctagaatctgagactgacctgggctcaaatttgttttattctttccaccccctgagcacgccaccgttttcttatgctaagagtaaagccatggcctccccttggactctctgcctccattctctcctcttccactccattttgtattcagcaaccagaccaatcttctcagaacttgaatctgattgtatcccatccctgcttacaatccttcagggacactccaccactgtcaggatgaaggctaaattccttaatttggtttcattaagtcggtctgcaatctgcttgagcatttcagcttaatcgccagaggattgcttccatatttccccctaaacatactttacccaagctgtaagatcctacataattgtgccaataatttagcagtgagcttcctggtagccgaagcaaaaagggaaagaaaaccactgtgtgagttgtgagaaagtaggaatcaataaaggctggagtggtcatggaaggctttctgggaaaggtagaggttgagctaaggaaagaaagtattttaataggtaggaggacccttcatggagctgcccttccattaaggtctagcctggtcaccgtgcctgggtctgaggccctccctccacagggctgccttgagcgacacagtggcgctgtgggagtccctgcggcagcatggggagaccaagctacttcaggcagcagaggagaagttcaccatcgagcctttcaaagccaagtccctgaaggatgtggaagacctgggaaagcttgtgcagactcagaggtgagaggagaggcggatgggaggtggttcacgccatgcaggttgaggacatgtaggacccattctcaagtttgtcatgggcatttccagtgccccctgtcctctgggacaccccatgccctctttctgggcaatggctaaccagagtctctcactgcactcgctgcccaggcggagcctctagaattgaaaactttgctgcattcaaaacctgccatcatgtgcccaagtcttagctaaagccatggagaacctctccccttctaggagttaacaaggatgccttgtgcacctagtaacagaagtgacacctactgccaccctttgaggcatttaggacaactgttgtcccaaatttatagacggcagagctaaggtccagaaggcagacaaaacttgattacagaacaagttaactgtctttcattcattccttcatcacacattgtttgagcgcctcttaagtgctgtctgggataggtactggtaagtgcctaatctgaggctcatttccatgaaagatacagtcctgagatcttttatttttatttttattatttcttaaagacagggtctcgctgtgcctaccaggctagaatacagtagtgcgatcatagcttactgtagcttcggaactcctgagctcaagcgatcctcctgcctcagcctcccaagtagctgggattataggtgcacgtcatcacaccggatgattttttaagtttttgtagacacagggatcttgctatgttgcccaggctggtcttgaactcctggcctcaagcaatcctcctgcctcagcctcccaaagtgctgggactacagtcacgaggcaccgcacccagacagatcttttttttttaagagggggacaacagttgccccaaggaaagcaatccccctggggaatttggggcactggggcagccatcatgggacccatgggtaagggctcagtgacagcagtgcctgctccccctaacattgcctgttctctccaggacgagaagttcctcggaagacacagctggggagctccctgctgttcgggacctaaagaaactggagtttgcgtaagcaaaggggtggattgtcttgtgggtctgcgcaaggtttcccctgcagcattagctgggcttgtaccacctgaatggagatagatctccagaatcattcttaccctcttgcccaccactttggaaatagcttccagcagctggaaagtgaccagtgtgggcaaatgctggaggttctcagatttgaagctaatggacccgtttgctggttaacatggtcattcccatcactcattcaacagacgtattgagcacttgaatgactgaggctgctgtcctcatgagctgacagtctaatcaactcccctctggaggaggtcagggggacttcctggaggaggtgatatctgcactgaagcttcagtgaggataaggaatgagctgagtggggagaggggagtaagaaaggctttccaggaattgtaatttggccagggatcagaaaaggcccaatgtgtccccaaccttccataggaggatgccactatgactatggagtccttttccctcctgtggccaggaactgcacaacgtcccttgtgcctgagcttgtttacttccacagccaagggatggcctccccagggagaatctttcccccattttgaaattcccaggagcttttgatgtgcagctaggatgaaaaagcaaccctacttgcctgggactatcctggtttgaaaactgaaagtcttgcatcccaagaagcccttagtcccaggcaaactgggacagttggtcgctctatgtgtggccagggctgggggccaacaccctaggcagtgctgctggggtgacagaaatggagacctaggcaaggctctagggagtccagttgtgtctgggtcactgaggaggggcagcccaccatacatgggccccaagaaagcacaataattattatatttagatctgtcagtatatagcttttctttctttctttcctttctttctctctttctttttctttctttcttctttctttctttctctctttctttcctctttctttcctttcccttccttttctttccttccctccctccctcccttccttccttccctccctcccttcttcccccttttcttctttttctttctctctgtttctttctttctttctctctctctctcttccttccttcctccctccctatctctctctttctttctttctttccttcttttctttctttcctttctctcctttctctttctttctttccattctctttctttctctttccttccctcccttccttctcttccttccttctttttcctttccttttcttttctttcttgaggcagagtcttactctgtccctcaggctggagttcagtggcacaatcacagctcaccacagcctcaacctccctaggctcaagtgatcctcccacctcagcctccctagtagctgggactacaggcatgccccacctgactaatttttgtattttttgtagagacaggatttcaccatgttgcccagtctggtctcgagctcctgggctcaagcaatcctcccacctcagcctcccaaagtgctaggattacaggtgcgagctcccgcacctggccagaacaggcttttaaatttgcagctcaccttccatctcaattatctcaggccaccctcctctacaggcattgtcatcatctccccattgtacaaatggcaatgctgagaacaagagactttaaattgtttatccaaagtcataaaggtcaggtcagcctggccctaagctccttccacagaaaaagctaaatgaatgtttgttccttggtaggggtctagatcatctaatgattaggaaggagttgttatgcctgtggtatattcggtgctgtttttttttggagatggggtcttgctctgtcgcccaggctagaatgcagtggtatgatcttggctcactgcaatctccacctctcggttcaagcaattttcctgcctcagcctcccgagtagctgggattacaggtgtacaccactacacctggctaatttttgtatttttagtagagacgggctttaaccatgttggccaggctggtcttgaactcctggcctcagatgttcctcccacctcagcctcccaaagtgctgggattacaggcgtaagccaccacgcccagcttataattcagtgcattttatatataatctcattaatctcaagagctactgtggaagacagacagtcatcatcttccccattttacagatgaggagacggaggcctggtgaggttaagtgacttgcccgtggtcccccagctggtcacccacaagctatcagctctccctgatcactgctcccctgtgccccagaaaaaagccagtgtctcttgttttgaacagagacaaggtgctaaatttgtccagaggtaaaaatgatgctgaaaagggggaatgtctgaaaacaataactgagggccctttctggccttaaattattttcagctgaaaaagcccctagttcaagatcggaactgcgctctggggaacagcggccatggggtggaacagcctagagccgggtgatcagccacctggagaccggaagcccccgaggaggttctgaggaaggaaggaaggaaggaaaagactatttctggcattttctcaggcttctactgtgcccaggcaccctgtagacctcatctgtctgtcaaatcagggttcttagccactcacaaccctacagggacttcgtttgtacacagagtccttccccagttcagtccccactcacctgttcacccttatctcctacactcgctgggtgctctctccattccagccacagggcctccttgctggctttcaacctcctaggcatgcttctgcctccaggcctttgcaccggctgtgccctctgcctggaatacttctccccagatatctgcatggctcatgccttcacctcctctggtctttactcagtgaggccttttcttttctttctttccctgtttctttctttctttctttccctcctttctttctttctttctttctttctttctttctttttccttttttnnnnnnnnnnnnnnnnnnnnnnnnnnnnnnnnnnnnnnnnnnnnnnnnnnnnnnnnnnnnnnnnnnnnnnnnnnnnnnnnnnnnnnnnnnnnnnnnnnnnnnnnnnnnnnnnnnnnnnnnnnnnnnnnnnnnnnnnnnnnnnnnnnnnnnnnnnnnnnnnnnnnnnnnnnnnnnnnnnnnnnnnnnnnnnnnnnnnnnnnnnnnnnnnnnnnnnnnnnnnnnnnnnnnnnnnnnnnnnnnnnnnnnnnnnnnnnnnnnnnnnnnnnnnnnnnnnnnnnnnnnnnnnnnnnnnnnnnnnnnnnnnnnnnnnnnnnnnnnnnnnnnnnnnnnnnnnnnnnnnnnnnnnnnnnnnnnnnnnnnnnnnnnnnnnnnnnnnnnnnnnnnnnntggccaacatagtgaaaccccatctctactaagtatacaaaacaaattagctgggcatggtggcaggtgcctgtagtcacagctacttgggaggctgaggcaggagaatcatttgaaaccgggaggcggaggttgcggtgagctgagatcacgccactgcagtccagcttggatgacagagtgagaccccatctcaaaaataaataaataaataaataaataaataaataaaactccattcccctcatggttaaaaaaaaaactccatccccctcaccactgtatatttccatatgattcattgtctcagacatcagcttgctttccgatttctttgattatctgtctatcttcccccctggaatgtcagcacccagaaggcagggattttcgtctgtttggcccacaactttcctccctgggcctggcacatagtaggcaagcggtcaatatttaacaacgaatgccttaatccaagaacccccataagattggggtgaaatatttgaggagatcaagacttaagggtgaagggatttgccaaggcctttagcagggagccaaatgccagatcctggagtcaaactctgatcctgtggccttttgctgaggccagtgttctcagacttcaggatttcagaggccgagaacatttcggaatgaattcaagtgaccgtgcgcggttactgttttttaatgtttatcaaggatgctcattcaaacaaacaaataacaacaaaatacccactgctggcaccataattttaccaaagaatgatcattctaatattgaaaaagttcaaaggacataattgcagaataaaagacagctctttatatggaatgcatttaaccatatttttaaactaaacggcccttcgttgtccttatttttctcatccccttgaagtctgctctaaatgttgatccaggctgtgtgaccctgtgtgagctatttgatcgcctagtgcctcagtttccctatatgtaaaatggagataagagcccatagctcagagtcttgaggagtaaatgagatctaggccgagggaagggcctagcatgcccctggcttataataaatgctcaacaaatggttccttttgttattaaaatgcaaaggcatattagtcaaccacctggtttaccactggcagtggtcgtcagctggcatttcaggaccccttccccaggctgcggcgggagaagggtatctgtggatgttgggaagagtaagaactggctccctacttagagacaaaagctggggagccccaagatgggagcccaacttacctctttttcttttctttttttgttttttttcttttttgagacagggtctcgctcttacccaggctggagtgcagtggtgtgatcatggctcactgcatcctccacctcctgggctcaagcgatgcttccacctcagcctcctaagaagctgagaccacaggacacaccaccacactcggctaattattgtgttttttgtagagactgagtctcactatgttgcccaagctggtcttgaactcctgggctcaagcagtcctcttaccttggcctcccaaaatgctggaattacagacatgagccactgttcccagcctcaactggcctcttatggggggctatgaaatctaccccaagcagaagagattggggtcctacgtggaagggttgcagggacctaagaggctggggtggaagggaagaggaggggcctcagacaggacctgacttctgtgccttgtctctgccccaccctggggctgaatgaggggctgtgactgtgactggaggtcttacccttgctctttgcctcctaggctgggccctgtctcaggcccccaggctttccccaaactggtgcggatcctcacggccttttcctccctgcagcatctggagtgagtatagactctgggaccccttcctctcaacatctgggtgcagtgctgtgatcatagctcactgcagcctcgaattactggcctcaagtagtcctcctgcctcagcctcctgagtagctgggaccacaggtgcatgctacagtgcccagcaacctctgggttttgacaaccccaaatcctgcccccaaggcacctgcagaaagaaaagccctcactttgtccctttttttctctcttccgcctactgcatcctcaatgtggctggcacatgagtgatgagatgacgccacatcagatgggaatccccagtgacaaaaaaagttgtagatcctttcgtgacctttgaaactcctttcctcacaacctcatttgctgctctcagcaattcagctggggagggattggggagcatagtcctactttacagtggaggttaaggaagttgccaagcctcaggggcttagttcctaagaagctaaacagggattcaagtccatcatgagttagactttgccctctggctgcctggttggagcccccaggtgatgaagtcctcgtctgaaaagctcaggaatgtgccggctgcctatggtgtattagagctggggggtgggaagggcaggtgccagggctgaggaggccctcactgggatgggaagggtcagatggccccaggacgctagctgatggcccccatctgattccacctgcagcctggatgcgctgagtgagaacaagatcggggacgagggtgtctcgcagctctcagccaccttcccccagctgaagtccttggaaaccctcaagtgagtgagctgggcctgcccttcctgctgaatcgggcccccaaagtccggctgactttttcaaaattaatttaaatttgtttttttagacaagggctcgctgtgtcacccaggctagaatatagtgctatgatcatacctctgcagccttgaactcctggcctcaaggaatctcctcacctccgcttcccaaagtgctgggattataggtgtgacttaccatgcccagccccagtggattcatccattcactcattcacctattcaatcagccattcatccttccattcaatgattcatccattcactcatgcagtcatttctttactccctcatccaaccactcactcaatcatttctttacttacccaaccatttattaatttaatcaacaaatatttaaggaggacctactatgtgcaggcacctttctaggccctggagacccagctttaaacaaaacaaataaatcccctgacctcaggaatcttaaattctagtgaggagacacaatgaacaagtaaacaagtcggtaattataaagtatacagtaatgaaaataatgtttggtgacagaaaattatactggggggtgaaataggagagatagattaggatttatcaataaagcattattatcaaaacagtaaaactttttaaaaactgttctgggctctgggaagttggagatggataagatacaggaggatcaatgtgattttttttctttttttcagacaaggtctcgctctgtcacccagggtggagtgcagtggtgtaatcatggctcactgcagcctcaatctcctaggctcaagcaatcctcccatctcaaccttctgagtagctgggacaggtgcatgccaccacgtcccgctaatttttgtatttttttgtagagacgtggtttcaccacgttgcccaggctggtcttgaacttctgagctcaagccatcctcctgcctctgcctcccaaagtactgggattacaggcatgagtcactgtgcctggttcaatgggatttttttttttttttttttgacacggagtctcgctctgtagcccaggctggagtgcagtggtacgatctatttattgcaaacttcacctcctgggttcaagcaattctcacacctcagcctcccaagtagctggaattacaggcatgcaccactacacccaactaatttttgtatttttagtagagacggggtttcaccaggttggccaggctggtcttgaactcctgacctcaagtgatccgcccacctcagcctcccaaagtgctgggattaccggcatgagccaccacgcccagttcaacatgattttttactgaacctagaggatatcaaaatcttcccacactccccctcacaaccaaggtcttagaatggccaaataatttaccggaatttacttagcaatttccttaattgtaggactgtgggacttctccagtaatttctagtgtcctaggtaacactgtaagctagatttcttctccttagtccttccgtccccctctttcttacccgccaccccacttaagtatttattgagcacctactatgtgcctggcagtgctctaggcacagggatacagtaatgagcaaaacagacacagccctgctccatgtgaagcccacaacccggcagaaaggattacacagccattaaacaaataatgccaacacttatttcattatagtgctgaaaagtggcgcagagggaaaagaggggatgttgtaaagtcatgggacaggtgggggcaggagggtgcactctccctcccatccacctcctcatccctgccctcccacttggccacaggacctaacagtatcctcctgtttaccgagaggtagcttaagtctgtcgacagcgccattcacagcctatgacccagaactctccttgaggtcaaagtgaggcatgcaagtttggtcctgagccctccccctcactgtgtccccgcagtctgtcccagaacaacatcactgacctgggtgcctacaaactcgccgaggccctgccttcgctcgctgcatccctgctcaggctaaggtgagtggggccccggataccggtcaggtgctgagctggggggctgcagagcgcagggaacccacatcgtgctggctgcaggggacactgagaccctagaagcaatcaccacagccctgaacaaaaggattagcgggacgtggtgaaagaaactctgagcaagtcacttattcattcctagcccctgttttcttacctggaaaatgggaaccatcctaatggtctatgtaagcacttgtcacaatgccaggttctgttatgcaataaatattgctccttttcccccagggatggcgggaccaggctttttccggaacctaggggtggtggcttctggaaggctaaccacgcacgtcagcttttgccggccttgtcacttacatgccggtcagtgtttcactgccaccttctggtaggccttggcatagcacctcttgcttttgagtgacttccatccaggccctggtgtggtcccagaggtaatgagcggactgagcttggaccagagccccagtcatccaactcagcattaccagctcttcttactcgccagactgagagaaactgctctcctcttcgccagagctcttcacttactgaggacaaccagagtcagattcccaggaaagatggcatttggtcccttattatttatttatttttaatttttttaatttctgtttttgagatggagtctcgctctgtcacccaggctggagtgaagtggtgtgatctcagctcactgcaacttctgccccccaggttcaagctattcgcctgcctcagtgctccgagtagctgggattataggcgcccaccaccacgtccagctagtttttatatttttagtagagacagggtttcgccatgttggccaggctggtctcaaactcctgatctcaggtgatccacctgcctcggcctcccaaagtgagtactaggattacaggcgtgagccaccatgcccggccaacttatttatttatttatttatttatttatttggagatggggtctcacccaggttgtagtgcaggggtgcaatgatggctcactacagcctcgactacctggactgaagcgaacctcccacctcagccttccaagtagctgggtcctataccctcctgagccttgttaatttcttcccagcatgatcactgttttacaatattttatttatgtaggtgcttacttcttgctatgcaaagaaactcagaagcaaaaatagaatctgtctggttcataattgtgctaaaaactagagatacaagtatgaactagagagatgtcgttcttgcttttgagtttctttgcgtagtaggaattaggcacatacataaataaaatattgtaaaacagtgattcatgctgggaaggaaactaacaagccccaggagggtacaggacttctggggagatgattcttccgtgggaagctctaggggaaaaggactctaggaagaaagaacagcaggtgcaaaggccctaagtgggaaaaggggctgtgttttaagggtcagaagggccactgtggctgtgtgtagtgaatgagggacagaggctgggcaatggtggaagtaggggaggtcaggggaatccagatcacacagggaggcccttgtgggtcacaagaggtatttgcagtttttcagtgtgaatggaaaagtaggtgggcctgggaaggcgacacttgatctgatttacacttttcttttttcttttcttttctttttgagaccaagtctcactttattgcccaggctaaggtgcagtggcatgatctcagctcactgcaagcactgcctcctgggttcaagtgattctcatgcctcagcctcccaagtagctgggattacagatgcccgccaccacaccaggctatttttgtgttttcagtagagacagggcttcgccatgtggcccagactggtcttgaaatcctgggcccaagcgatccacccacctcagccttccaaagtgctgggattacgggtgtgagccaccatgcccagcctgatttaccctttaagaaacatcatatttcatggaatctaagatgccatccattgtaagaccccaatatgaggccaaaatgcaaactgtgacacgctattggttataagacacatcctgatctcaatgatattcaaatggtgacatatatgtcttggcatcgatgaaatatggtcagattactctccctgtggggtggaggaagggtctccagggttcagagattgcaaaacccccatctagtttctgcactggtaccggccgacccgtgatgtgagttgatttagcctgaatccacttggcagcagtgtaaacctgctgcatttatttatttttttctttttttttcgagacagagtttcgctcttgttgccaaggctggagtgcagtctcagttcactgcaactccgcctcccgagttcaagcaattctcctgcctcagcctctcaagtagctgggagtataggcatgtgccatcacacccggctaattttgtatttttagtagagacggggtttctccatgttggtcaggctggtctcaaactcccgaccttaggtgatccacccgcctcggcctccaaagtgttaggattacaggcgtgagccactgcacctgctgcttttatatgcagccctgcaagggagttctgaggctgaatcatggcaaagtcatggccctgaaatcatacccgcagcagcacctgacctgttaaaaggctgcttggtgtcgagtaaacagctgaagttggcatcagtgacactcatcatgctattttcactgctactaatgctggttgtgaatatgctgcagaaactggagctggtccagtgactggctttttctcttcctgcccccagtgctggtcacaccctctatgttaactcatgcgaccctcaccaatgttcctgtgatgtagtcagaaccatagctaacatttagttcattctaggcaccaaggcatattctaaatgttatatcagcattgattcatttactcctccccacaatgactctatcatgcccattttacagatgggcaaactgagtctcagaagagttgagtagcttgcccaaggtcacataggcagtaagaggcatagctgggatttgaacttgggaagttgttctgacagtttccacacagtaaggcaagaaatgacttccttttagtcctgctgttttcctgggctcactgtttgaccacagagaagtggtctcaactctctgggtcttggtttgcctgtctttaaaatggggcagtaatcccagtaggtggtgactcccacggggctgacctccaggctgcaggggacactgagatcctagaagcaatcaccacagccctgaacaagagaactagtgggacctggggacagaaactttgagcaagtcacttattcattcctagcctctattttcatatctagaaaatgggaaccatcccaatggcctatgtaagtacttggcacaatgccaggctctgttgtgcaataaatattggttccttcccccagggatagtgggaccaggctttttctggaatctagggatggtggcttctggaaggctgaccatgcacaggcctccaatccctccccctggcctctgtttccgacagcttgtacaataactgcatctgcgacgtgggagccgagagcttggctcgtgtgcttccggacatggtgtccctccgggtgatggagtgagtgtgggagtctgggcggtgggtggctcagcccggggtgggagacactgaagtctctccctggtgtcctggaagagctggatgtgggggtggccttggtctggagctggggagtcccaagggccaggccccaaggtgagtttctcttgccagcgtccagtacaacaagttcacggctgccggggcccagcagctcgctgccagccttcggaggtgtcctcatgtggagacgctggcgtaagtccaggcaaccctggtgggtggagaacaactcactccccaggcgtgtggcccagtgtgaccccggagctcaaatcatgctcttcccttcaccaatctgcaaccctgggtgagcagacacttccccctctggcttcagcttcttcatctgtaaagtggggacagtaataatatccacccaagaggttttgtgaggcttaaactaatcaagccctacaaagctcttataacaacagtagctggcacacaaaaatgccaataaatgctatattaggctgaaccatatgaaattgctgacatccacccatttttgacctgtaaaattggcaatttcatatggttcaggtttatcttttattaagtcaccatgatgtccaatactggttactttatattctttcaaagcacttttatctccacaatcactcacctcttctaagacgcacagggtgggtcttacaagacccattttacagatgaggaaaataaagcacagagcagttaactaacctttctggggtcacacagcaagtcagctgcagaaccataaaggaatctcgggcctcctaggcttctccttttccccatgacccacaccggtcggtatcttgccaggggaaaagtccccaacgttctaggctgggtggaaggagggatttgggggcagctgtcactggggccccaggccgccctctctcctctaacctagctctgagtcccatccccccttgcaggatgtggacgcccaccatcccattcagtgtccaggaacacctgcaacaacaggattcacggatcagcctgagatgatcccagctgtgctctggacagggtaaccagggtgggcttgggaggggagagccgcagtgggttgggggcagtgtccttgtgaaggtggcattcaaaaaatgtgggcgggacacaggtggggctaggccaccacccttggacgcatgcgtcatcagagacatcccctcatctccaccctgggctcggtggagctgtcctccaggctttgcgagcttggtccctgtggtcaggcttagagatcaggggacaggaaagttggccatccacatcccacagcctcagtgcttggaagagcttcctttggggactccaagccttcccagctgctgtttcggcttggtggctgccctgatgctccgggtttgtctcagatgaacttgcttgacaagtctcctgctcctcactatgaagatcactgtcccccagccctgtgctccccgcactgtgctgcacgtccacctccattccactgcccctcccatccccccatcttgatagcacccttcccaggtgtcaagctgcccctcctagagtgtcctgcctaaaccccctctcctggctcctcccgctacagcatgttctctgaggacactaaccacgctggaccttgaactgggtacttgtggacacagctcttctccaggctgtatcccatgagcctcagcatcctggcacccggcccctgctggttcagggttggcccctgcccggctgcggaatgaaccacatcttgctctgctgacagacacaggcccggctccaggctcctttagcgcccagttgggtggatgcctggtggcagctgcggtccacccaggagccccgaggccttctctgaaggacattgcggacagccacggccaggccagagggagtgacagaggcagccccattctgcctgcccaggcccctgccaccctggggagaaagtacttctttttttttatttttagacagagtctcactgttgcccaggctggcgtgcagtggtgcgatctgggttcactgcaacctccgcctcttgggttcaagcgattcttctgcttcagcctcccgagtagctgggactacaggcacccaccatcatgtctggctaatttttcatttttagtagagacagggttttgccatgttggccaggctggtctcaaactcttgacctcaggtgatccacccacctcagcctcccaaagtgctgggattacaagcgtgagccactgcaccgggccacagagaaagtacttctccaccctgctctccgaccagacaccttgacagggcacaccgggcactcagaagacactgatgggcaacccccagcctgctaattccccagattgcaacaggctgggcttcagtggcagctgcttttgtctatgggactcaatgcactgacattgttggccaaagccaaagctaggcctggccagatgcaccagcccttagcagggaaacagctaacgggacactaatggggcggtgagaggggaacagactggaagcacagcttcatttcctgtgtcttttttcactacattataaatgtctctttaatgtcacaggcaggtccagggtttgagttcataccctgttaccattttggggtacccactgctctggttatctaatatgtaacaagccaccccaaatcatagtggcttaaaacaacactcacatttattctgctcacatatctgtcatttgagcagggctcagcggggacagctccttctgtcctactctgtgtcaggtggggcagcttgagggttgggctggtgtcacctgaagactcattcttctgtacgtctgacaggcaatgctggctgttggctgggggcctcagtgccactacggaatagttggctaggacccctccatgtgggctagttgggcttcctcatagtatggtggctgggttggagggtgtcccaaaaagaaaggaggggatagagagagaccacttttcataacctagccttagaagtcacacagtattacttctgctacatatatatgttttaagaggcagggtctcactctgtcgcccagtctggaatgcagtggtatgatcacggctcactgcagcctcaacctcctgggctaagtgatcctcccacctcagcctcccgaatagctgggactacaggtgtgagtcaccaagcccagttaatctttagttttatttttgtagagccagggtctcactatgttgcccaggcaggtcttgaactcctggcctcaagtgattctcctgcctcagcctcccaaagtgctgggattacaggtgtgaaccaccacacccagcccacttctgccatattctgttggccagtgtgacaaggattgctactgtcctacccaccctcctttcaccacatgtgcacatgcacgtgtgtgcacgtacacacacatacacacacacgcgtgcacacaccagagcccaccttggctcaagtcctcttttctgagaggacttttctttgtggcttcctaaaattcagtggaaaattaattgtttggggatgagaaaggttgaagcaccaaaagcttaccaaggggaatgtttgcctctgcctctgacacacagctctgtcctgggagtgagctggtttttagcggagacggagtcccaccttggctgcagggagtccgaaagggacttggaagctccgctttctacccagcgagctgccggcacgactgttgcttttcactcgggcatagtctgctcagaagccccaattcaagacatcttagcttactcctggtggcagtgggagctgcctgttcagctccagctcaccagccccagtgcccacaggatcagtctgattcccaagctctgctcctctccccagcaagtgagagctgggtgtcaagagggtctgaggaatccagacccggctgcgtggttgatgatctttgcagacaggcaagcacctcctgcctcgaactggctgcaaagggtatcaggtgctgccatccaggttcagcttgtaaatagctcaggtgtcaccctgcaagggatccctgcacttgcagactctacagaggccatgggcctcctgtgtgtgcggctacaggagtgagcactgaggtgtgctctgatcatccactgtgccatgtgccaggtttttggtctgacccactgcttttggtctgtgtgatgatgaaatgaggtcagagcctgcagttattaacactaacgatttgttaatgatagctactgtttattattttatttaatttttttgagacagagttttcactcttattgcccacgctggagtgcagcggcatgatctcggctcactgcaacctctgcctcctgggttcaagcaattctcccacctcagcctcccaagtagctgggattacaggcatgcaccaccacgcctggctaatttttgtatttttagtagagatggagtttcaccatgttggccaggctggtaatctgcctgccttggcctcccaaagtgctgggattacaggggtgagccaccgcacccggccactactgtttatttaatgagcagatacatgcaaagcccttatcacagtgcaagggaaattcaaagcgctcagaaagtattagctcaataagtgatgactgtgtgccagacactgtgctaaactcctactcaagagggataagagtctaggggcaggtggcagagactctagaacgagattgcctgggctcaacgcccacctcaccacttacttatgcaagctagttctctgtgcctcagtctcctcatttgtaaaatgggcataaccacagcaccttctttataggattatgtgaaggtgtggtgagctaatacgttaagaattggagctcaataacatgttggctgtcattattacatatatctgtgtttcattcttgcctctggctgggaatgttcttcccagctctccatatggctgatttctcatccttcgggacttgccccattctccaaccccatcactagttttatctttttcacttatttatgcagtctgctcttgtcctaggacatgagctccaggagggcgggaaacatctcgctttgtacactgctgtgccctctgtacccagcaaggcgcctgtgtataataggtgctcaataacataaaatgaacaaataatcctcacctaacggtttcattcattctacaaatacatactgacagcacagtcatgaataagatgttcctgccctggtgagtcttatattttagcaaattaaaaaaactctttggacagggctgccaggtgaggttggccagtctgtacactgcacaaaggcacctgggacaagggggaacatgggggctgcaaaccagtctgggttctgcttgccaaactgggagtcctggtgtggagccttttaacccagaggggcatcttttcgtagttaacgcacagtcatcgtaagatgtggataaattactgtctccgtgtcacagatctaagtgatacttatagtcacactcctataaaggaatggacttctgacttctttggaggacctctctgcagggacaggcacagtgtgccggaagtgcccctgaaccccatttgtcaggtggtaaagcgctgctcggaggaatcagggcatgatagtgcaattccatgtccagtggattgtaagtccacgcaccttccaaatggtcactcttcctcgcaggcctctctctgcatacaaatgtctccctcctgacgctcacctttttccctggggctctcaaatgtcttcttttcagatttcgtagcttttctttctttagcatcacttgagggcaagtggtgctccaactgtctccccccagagttctgccgcctgtactctcccacacctcagtctcctcgcctgtagaaaggggtcaatcgtttgaaccctgcttcacttggtgtgtatgtgaaggtgctttgaaatcaagtgctctgcaaactggagagaattactgcttgtattccgtgaaactacaagctcccaattccactcatttaatccctctcttgctctgttgcccaggctggaatgcagtggcatgatctcaactcactgcaacctctgcctccctggtttcaagcaattctcctgcctcagcctcccgagtagctgggactataagtgtgcgccactatgcctggctaatttttttgtatttttagtagagatggggtttcaccgtggtggccaggctggtctcgaactcctaacctcaagtgatctgcccgcctcggccttccaaagtgctgggattacaggcatgagccaccatgccaagcccttcccccctatctttaatgaaggtctaccatgtgcctgacacaggggatacccacccccacttctatgggattcaggcctggtttccagcttggccttcaggcttttcccaccacaccccaaatgctgtccctggcttgtggagtggggcagggggccagcctgggactttcacgccagcccgactggggcagactctctcaaccccactggatcttctgctgtttgtcagccacaaggttctgcctagaactcctttcccgaatctcaaagttaaaaaaaaaggcagggccccaggggttggagttgcatacatttttttttaatccaaagaagtaagcctcctaagtattgcttagacaggtttatcagaattaagtaggcacaacactcatactttcagaaaagcatttccagccaggggagtaacgtggcactcaccagcatgatgtctgttttgccaacttgctgaagaacgagtaacctgaaatgaaggagcgagaatcccaccctcagccccccaacagcttcctcagcttctttttcttctgagtcacccctgaaacagtcgctgcatctaagaccagcctcgggctaaacccagctggcctgaaggctcaactcacatcaaacggagctgggagtcgcttttgcgtgtgtccgcagtttgaagtgtcctctccgaaggtgaagtgggggaagcaggtgcgctccgggatgaagtgcagggaggcaaactctggctgggttcctgtaaacatccatcgcagctgcaaataatcagaagccaaggccaggccatcgatttgacactgcaggcagatgaggtcttgggatgcctcttgcgttcccccttctgtgggagcaggtgccttcccaacctcagcactcagtcccaatctctcttccactctcctgggttcaaacaggaacctctctgttggcacgaagcttttgaggggagcaggtctaacaagaaggaaaaaggggggttattagcacggaagccccaccctgccaccaggttggctggggacagggaccaatccaccaggctcgggaggcttggggtggggcagggaagtcttcctccatccctcaaatttagggaaccactgggagccccagactcaggctgaaaatgtctttctgcaaatataaaactctttttaatgaatttgcctaatttctcagagaccctgggctggagaaccagtgcaatgtcacacgggagaggaaggactgtcctgtttattgggagggaggagggggatgctggtgcagcctgctcaggagtcacccagggtctgagggctgacttgcagctctgggccagctgagccagcgctgggtagtgggcagggcttggcaacacctcccaccttgcccggaaaaatgctttgcaacctacaggaaggcactagccacagccaagttactcagcagccccacttggctctttctcccaggatgcagcatcatctccatggcctggccccctggcacgtccccgtttcccactgccttctctgtgtgcctagccgggtgccagtgtctctgtagcacctcgtgttcccatgcccaacccctctgcagccccctcaagccctgctctgattccaagcctcatctcccagctcactatcctttccgcaaatttcactgaacatctcgcagaacttgtatgttaaacatgtgacatgtattgttgtttgacagggtgctattgacatttggggtaggacaattcttggaggtggggtggctgttctgggcactgagcatttagcagcatctctggctccaggccactaaatgccagtagcacccctggccactggaacaactaaaaatgccctcctaccctatttccaaggtcgacctaagggggcggaactgtttccattgagacccatgcatcgtataggataagaaactgaggttcttatcatttaataggataagaaattgaggttcagagaagccaagtaacctgcctaaagatgcacagctatgagaggcaaagctggcactggcttggtaataacgatggaaacggtctgaatgagagcaggtaccatttcctgagctcttagcagacgctgaggaccctgctaagtgccatgagaccttagcagaggctgtgggtgccccgccccattccctccactcactcttccttgcaggtcgacctgcccttctttgctgaggcctttctctgcctccagagcctgcttggtcctcaggctgtaagtgcaggcagagctaatgtctctccatagctgccctccaccagcctgctcctgagacacctgctggccagcagcctgaagcagaatcctttactcagattcagccgcacagatgctcactgcagagatctccaaggcctgtggtcatccttgagcccatctcagatttgtgtggatagggtgttagagaacatggaatcagctggatagagtggttcatgcttgtaatcccagcactttgggaggctggggtgggaggatcacttgaggccaggagtttgagaccagcctgggcaacacagtgagactctgtctctataaaaaatttaaaaattagccaggcatagtgtagtctcagctacttggaaggctgaggcaggaggattgcgtgagcccagcagttcaaggctgcagtgaactatgactgtgcccctgcacccagcctgggtgacagagaccctgtctcaaaaaaaagagaagatggaatcactcggtgaggacctcactcctctcccagtcctgtgaccacaaaccgcatccccgacagtcccagccaggcgctagtctggctgtagctgccctcttgtgtgcagatctccagtctgaatgggctacacgtggaatttactaacactccggttttcattgtgtttatctgtagggttaccttctatttatagcaagtgatgccaagtttccatttctggtagtaatatagtttttcttttccaagtcgctcacacctgtaatcccaacactttgggaggctaaggtgggtggatcagttgagatcaggagtttgagaccagcctggccaacatggcgaaatgaggtcaagactagcctggccaacatggcgaaaccgcgtctctactaaaaacaaacaaacaaaaatacaaaattcgctgggcatggtggcaggtgcctgaggtcccagctactcgggaggctgaggcagaagaatcgcttgagctagggaggcagaggttgcagtgagccgagatcacgccactgcactatagcctaggtgacagagtgagactctgtctcaaaaaaacacaaaagtttctcttttcaaaacattttactttaaaaggagccaatttaaagaaaactgttaatagttcaggtaacaggcagatacaggaaaagctgctgacagtgttgtatgaggtttgaggattttgatccaagctggtcccactcagtccatagcagagaatgaaagggcccagagagggtggtgacctctgcctgaagtcacacagtgagtcgaggacagggaggtgaccccaggtttctatgtgtagggcgggaggatgttctgggacacagttcaattctcatttgtcacacactttggctattagagatcaaccccttcgctcctgtgtcttgcaatggcagccttggcaaacgctaaatgaaaatcgtgacaacacttgtgttatgaagcatttactttgtgttcaccttgtactactcgaactcatgtcttaactcannnnnnnnnnnnnnnnnnnnnnnnnnnnnnnnnnnnnnnnnnnnnnnnnnnnnnnnnnnnnnnnnnnnnnnnnnnnnnnnnnnnnnnnnnnnnnnnnnnnnnnnnnnnnnnnnnnnnnnnnnnnnnnnnnnnnnnnnnnnnnnnnnnnnnnnnnnnnnnnnnnnnnnnnnnnnnnnnnnnnnnnnnnnnnnnnnnnnnnnnnnnnnnnnnnnnnnnnnnnnnnnnnnnnnnnnnnnnnnnnnnnnnnnnnnnnnnnnnnnnnnnnnnnnnnnnnnnnnnnnnnnnnnnnnnnnnnnnnnnnnnnnnnnnnnnnnnnnnnnnnnnnnnnnnnnnnnnnnnnnnnnnnnnnnnnnnnnnnnnnnnnnnnnnnnnnnnnnnnnnnnnnnnnnnnnnnnnnnnnnnnnnnnnnnnnnnnnnnnnnnnnnnnnnnnnnnnnnnnnnnnnnnnnnnnnnnnnnnnnnnnnnnnnnnnnnnnnnnnnnnnnnnnnnnnnnnnnnnnnnnnnnnnnnnnnnnnnnnnnnnnnnnnnnnnnnnnnnnnnnnnnnnnnnnnnnnnnnnnnnnnnnnnnnnnnnnnnnnnnnnnnnnnnnnnnnnnnnnnnnnnnnnnnnnnnnnnnnnnnnnnnnnnnnnnnnnnnnnnnnnnnnnnnnnnnnnnnnnnnnnnnnnnnnnnnnnnnnnnnnnnnnnnnnnnnnnnnnnnnnnnnnnnnnnnnnnnnnnnnnnnnnnnnnnnnnnnnnnnnnnnnnnnnnnnnnnnnnnnnnnnnnnnnnnnnnnnnnnnnnnnnnnnnnnnnnnnnnnnnnnnnnnnnnnnnnnnnnnnnnnnnnnnnnnnnnnnnnnnnnnnnnnnnnnnnnnnnnnnnnnnnnnnnnnnnnnnnnnnnnnnnnnnnnnnnnnnnnnnnnnnnnnnnnnnnnnnnnnnnnnnnnnnnnnnnnnnnnnnnnnnnnnnnnnnnnnnnnnnnnnnnnnnnnnnnnnnnnnnnnnnnnnnnnnnnnnnnnnnnnnnnnnnnnnnnnnnnnnnnnnnnnnnnnnnnnnnnnnnnnnnnnnnnnnnnnnnnnnnnnnnnnnnnnnnnnnnnnnnnnnnnnnnnnnnnnnnnnnnnnnnnnnnnnnnnnnnnnnnnnnnnnnnnnnnnnnnnnnnnnnnnnnnnnnnnnnnnnnnnnnnnnnnnnnnnnnnnnnnnnnnnnnnnnnnnnnnnnnnnnnnnnnnnnnnnnnnnnnnnnnnnnnnnnnnnnnnnnnnnnnnnnnnnnnnnnnnnnnnnnnnnnnnnnnnnnnnnnnnnnnnnnnnnnnnnnnnnnnnnnnnnnnnnnnnnnnnnnnnnnnnnnnnnnnnnnnnnnnnnnnnnnnnnnnnnnnnnnnnnnnnnnnnnnnnnnnnnnnnnnnnnnnnnnnnnnnnnnnnnnnnnnnnnnnnnnnnnnnnnnnnnnnnnnnnnnnnnnnnnnnnnnnnnnnnnnnnnnnnnnnnnnnnnnnnnnnnnnnnnnnnnnnnnnnnnnnnnnnnnnnnnnnnnnnnnnnnnnnnnnnnnnnnnnnnnnnnnnnnnnnnnnnnnnnnnnnnnnnnnnnnnnnnnnnnnnnnnnnnnnnnnnnnnnnnnnnnnnnnnnnnnnnnnnnnnnnnnnnnnnnnnnnnnnnnnnnnnnnnnnnnnnnnnnnnnnnnnnnnnnnnnnnnnnnnnnnnnnnnnnnnnnnnnnnnnnnnnnnnnnnnnnnnnnnnnnnnnnnnnnnnnnnnnnnnnnnnnnnnnnnnnnnnnnnnnnnnnnnnnnnnnnnnnnnnnnnnnnnnnnnnnnnnnnnnnnnnnnnnnnnnnnnnnnnnnnnnnnnnnnnnnnnnnnnnnnnnnnnnnnnnnnnnnnnnnnnnnnnnnnnnnnnnnnnnnnnnnnnnnnnnnnnnnnnnnnnnnnnnnnnnnnnnnnnnnnnnnnnnnnnnnnnnnnnnnnnnnnnnnnnnnnnnnnnnnnnnnnnnnnnnnnnnnnnnnnnnnnnnnnnnnnnnnnnnnnnnnnnnnnnnnnnnnnnnnnnnnnnnnnnnnnnnnnnnnnnnnnnnnnnnnnnnnnnnnnnnnnnnnnnnnnnnnnaaccaggaagtctagcttgatacccttggcctgtataactgagccttgtgccagttaaaagggcaaagcagtaggtgctcagggggtgtcggggccctgaaagctgatctgatccgctgctgcgtattcactaccgccctgggacgcctccagcagaccacctcactgggggaaacatcaggacagcgtggccaggagcccaatgctgccacctcatagatgggtatctgagatgagtcatcgaacttctgcaagcctcagtttcctccctggtctaatggaaccctccttggcggcttcacagggtgatgcttggggcaggtgatggagatgtgggagaggcagttatttttaaccacccagccaagccccttgccaggagggactcccagaaatgaagccttacccttgagggagttccccgccactccaagcttggggcctgggatggcagctgtgagggcaccagcaccatctggggactcgctgggtaccaattatcaccgcccttgggctacttcaaaggctgcccacacagacacaccctccttggtaaccagtcctcaggaggaagggcacccaaggaaagggggaaggcttcctgggctagagccccttcagggtctgacacgccattgacactgaccacgtcattcattaagcaagcaccaactatacatcattcactatcccaatctaatttgcacaagcccttaggcaggtgctactattatccctgttttacagagaaggaaaccgaggcttaggagatgaagtctgaggtgttggtggagctgggatttaaaccaaaatatgtccaactgcaaagcatgtaagtaacaattttagagggtatacggaggtgaccctaagtaacaaggaatcacatatagtgagcaagcaatttgcttttcagtttttggtcaatccttatgattatttagaggagaaagttcagtttggtgctggtatatcttatgtttatcacccgacagttgttaatctctttttaacaaagaatacaggccaaggccctgtgactttagctggctttggtatttggccaaaagttaatgactttggcagttagtgtttttatccatgccaagcgatgatgattttctctttagtgacagacattttttaaaaaataaattcacataaaaaagtagttttacagatgaagcactaaaactagtgcatttcatcttaaactgcaaattataaagggaataatagtaacttgacagtggagagacctggcagacaccaccttcaccaactgatcaaagttaacatcgccagaaaggggacagatggcatgtgcctctcgataagatgcactgaagacacacactcacttctgcaatattcctgccaagaatgcctcatctgaatctaatctcgagtataaccatcagacaaacccaaattgagagacagtttacaaaacaccagccttgtactctgcttaatatgtcaatgtcacaagagagaaagacagactgaagagctgatccagactgaagaaggctcgagattaatgcaaaagctgatctgggattgcatcttggacctcaactctcccctttttattgttaagggacactactgggacaatttttttttttttttcgttttgagacagggtctcgctcagtcacccaggctggagtgcagtggtggaataataactcactgcagccttgaactcccggactcaagcaatcctcctgcctgagccttccgagtaactgggactatgggcgtgtaccacaacacctcgctattttttttttcctactttttgtagagacggggtctcactatgttgcccaggctggtttcaaactcaagtgatccttccacctcagcctctataaaatttgaataaagttgtagatgagattggtcataggattgtatagtgtatcaatattagatttgctgattttgacaaccctactgtggttatgcaaatttgtccttgttctaaggaaataaatactgaattatttaggagtaaaggtgcataatgaacccattttcaaatgcttatgaaaattacacatatacacatgtgtgcatatacacaggcatgcatatacaaacagagggaagagcatgcacgtgtacatgagcaaagtgctaactggtgcaactggtgagtttgggcgggcattgtttgtgctcttgcaacttttctgtaagtgtgaaattacttcataacagaggtttttgtttgtttgtttgtttttaattcaggaaaaagttggaagagtgcgtatgaaataggcctggcagaaactatgagctggtgttccaaggtcggggatggggagccctcactggaggcacccctcaaaccctcagtgctgtggccagggaaccgggctggcagtcttagttggctttgttccctcggcctccacttccccattctgtgcctccatttatttgtgagacagggataaagaggtctgccacttttattgtgatcttaggtttcccaaaagcagagtatgctttcagaagttctgggaggaaagctagcagataaaccagaaatatgaatatccaaattgagagaagccctcactttcttagttcagcaaaacagacacatgagctgtaagtggggcagaccctgcctgtttcttggctgaaatctccagtttgtataattcagggctaagagagcaggactcttgacatctcactgtcttgagacacatactggggttttctcctgtctgaagacgcagctggcaccaatgtaccctatggccaaggaccttctgggtgagcctcatgtcaggagcagagctggagaggtggccaggcctgggggtatacttgcctccctgtgtcaccattgtctgtctcttgcttagatgacagccacagcttcctggcctggtttcctgcatccgccctgacccctggctgtgggatctcccataactcaaatctgactgtgtgccctgtggaaggtttgggtttctgacctgggcagctctatgtccggcacagnnnnnnnnnnnnnnnnnnnnnnnnnnnnnnnnnnnnnnnnnnnnnnnnnnnnnnnnnnnnnnnnnnnnnnnnnnnnnnnnnnnnnnnnnnnnnnnnnnnnnnnnnnnnnnnnnnnnnnnnnnnnnnnnnnnnnnnnnnnnnnnnnnnnnnnnnnnnnnnnnnnnnnnnnnnnnnnnnnnnnnnnnnnnnnnnnnnnnnnnnnnnnnnnnnnnnnnnnnnnnnnnnnnnnnnnnnnnnnnnnnnnnnnnnnnnnnnnnnnnnnnnnnnnnnnnnnnnnnnnnnnnnnnnnnnnnnnnnnnnnnnnnnnnnnnnnnnnnnnnnnnnnnnnnnnnnnnnnnnnnnnnnnnnnnnnnnnnnnnnnnnnnnnnnnnnnnnnnnnnnnnnnnnnnnnnnnnnnnnnnnnnnnnnnnnnnnnnnnnnnnnnnnnnnnnnnnnnnnnnnnnnnnnnnnnnnnnnnnnnnnnnnnnnnnnnnnnnnnnnnnnnnnnnnnnnnnnnnnnnnnnnnnnnnnnnnnnnnnnnnnnnnnnnnnnnnnnnnnnnnnnnnnnnnnnnnnnnnnnnnnnnnnnnnnnnnnnnnnnnnnnnnnnnnnnnnnnnnnnnnnnnnnnnnnnnnnnnnnnnnnnnnnnnnnnnnnnnnnnnnnnnnnnnnnnnnnnnnnnnnnnnnnnnnnnnnnnnnnnnnnnnnnnnnnnnnnnnnnnnnnnnnnnnnnnnnnnnnnnnnnnnnnnnnnnnnnnnnnnnnnnnnnnnnnnnnnnnnnnnnnnnnnnnnnnnnnnnnnnnnnnnnnnnnnnnnnnnnnnnnnnnnnnnnnnnnnnnnnnnnnnnnnnnnnnnnnnnnnnnnnnnnnnnnnnnnnnnnnnnnnnnnnnnnnnnnnnnnnnnnnnnnnnnnnnnnnnnnnnnnnnnnnnnnnnnnnnnnnnnnnnnnnnnnnnnnnnnnnnnnnnnnnnnnnnnnnnnnnnnnnnnnnnnnnnnnnnnnnnnnnnnnnnnnnnnnnnnnnnnnnnnnnnnnnnnnnnnnnnnnnnnnnnnnnnnnnnnnnnnnnnnnnnnnnnnnnnnnnnnnnnnnnnnnnnnnnnnnnnnnnnnnnnnnnnnnnnnnnnnnnnnnnnnnnnnnnnnnnnnnnnnnnnnnnnnnnnnnnnnnnnnnnnnnnnnnnnnnnnnnnnnnnnnnnnnnnnnnnnnnnnnnnnnnnnnnnnnnnnnnnnnnnnnnnnnnnnnnnnnnnnnnnnnnnnnnnnnnnnnnnnnnnnnnnnnnnnnnnnnnnnnnnnnnnnnnnnnnnnnnnnnnnnnnnnnnnnnnnnnnnnnnnnnnnnnnnnnnnnnnnnnnnnnnnnnnnnnnnnnnnnnnnnnnnnnnnnnnnnnnnnnnnnnnnnnnnnnnnnnnnnnnnnnnnnnnnnnnnnnnnnnnnnnnnnnnnnnnnnnnnnnnnnnnnnnnnnnnnnnnnnnnnnnnnnnnnnnnnnnnnnnnnnnnnnnnnnnnnnnnnnnnnnnnnnnnnnnnnnnnnnnnnnnnnnnnnnnnnnnnnnnnnnnnnnnnnnnnnnnnnnnnnnnnnnnnnnnnnnnnnnnnnnnnnnnnnnnnnnnnnnnnnnnnnnnnnnnnnnnnnnnnnnnnnnnnnnnnnnnnnnnnnnnnnnnnnnnnnnnnnnnnnnnnnnnnnnnnnnnnnnnnnnnnnnnnnnnnnnnnnnnnnnnnnnnnnnnnnnnnnnnnnnnnnnnnnnnnnnnnnnnnnnnnnnnnnnnnnnnnnnnnnnnnnnnnnnnnnnnnnnnnnnnnnnnnnnnnnnnnnnnnnnnnnnnnnnnnnnnnnnnnnnnnnnnnnnnnnnnnnnnnnnnnnnnnnnnnnnnnnnnnnnnnnnnnnnnnnnnnnnnnnnnnnnnnnnnnnnnnnnnnnnnnnnnnnnnnnnnnnnnnnnnnnnnnnnnnnnnnnnnnnnnnnnnnnnnnnnnnnnnnnnnnnnnnnnnnnnnnnnnnnnnnnnnnnnnnnnnnnnnnnnnnnnnnnnnnnnnnnnnnnnnnnnnnnnnnnnnnnnnnnnnnnnnnnnnnnnnnnnnnnnnnnnnnnnnnnnnnnnnnnnnnnnnnnnnnnnnnnnnnnnnnnnnnnnnnnnnnnnnnnnnnnnnnnnnnnnnnnnnnnnnnnnnnnnnnnnnnnnnnnnnnnnnnnnnnnnnnnnnnnnnnnnnnnnnnnnnnnnnnnnnnnnnnnnnnnnnnnnnnnnnnnnnnnnnnnnnnnnnnnnnnnnnnnnnnnnnnnnnnnnnnnnnnnnnnnnnnnnnnnnnnnnnnnnnnnnnnnnnnnnnnnnnnnnnnnnnnnnnnnnnnnnnnnnnnnnnnnnnnnnnnnnnnnnnnnnnnnnnnnnnnnnnnnnnnnnnnnnnnnnnnnnnnnnnnnnnnnnnnnnnnnnnnnnnnnnnnnnnnnnnnnnnnnnnnnnnnnnnnnnnnnnnnnnnnnnnnnnnnnnnnnnnnnnnnnnnnnnnnnnnnnnnnnnnnnnnnnnnnnnnnnnnnnnnnnnnnnnnnnnnnnnnnnnnnnnnnnnnnnnnnnnnnnnnnnnnnnnnnnnnnnnnnnnnnnnnnnnnnnnnnnnnnnnnnnnnnnnnnnnnnnnnnnnnnnnnnnnnnnnnnnnnnnnnnnnnnnnnnnnnnnnnnnnnnnnnnnnnnnnnnnnnnnnnnnnnnnnnnnnnnnnnnnnnnnnnnnnnnnnnnnnnnnnnnnnnnnnnnnnnnnnnnnnnnnnnnnnnnnnnnnnnnnnnnnnnnnnnnnnnnnnnnnnnnnnnnnnnnnnnnnnnnnnnnnnnnnnnnnnnnnnnnnnnnnnnnnnnnnnnnnnnnnnnnnnnnnnnnnnnnnnnnnnnnnnnnnnnnnnnnnnnnnnnnnnnnnnnnnnnnnnnnnnnnnnnnnnnnnnnnnnnnnnnnnnnnnnnnnnnnnnnnnnnnnnnnnnnnnnnnnnnnnnnnnnnnnnnnnnnnnnnnnnnnnnnnnnnnnnnnnnnnnnnnnnnnnnnnnnnnnnnnnnnnnnnnnnnnnnnnnnnnnnnnnnnnnnnnnnnnnnnnnnnnnnnnnnnnnnnnnnnnnnnnnnnnnnnnnnnnnnnnnnnnnnnnnnnnnnnnnnnnnnnnnnnnnnnnnnnnnnnnnnnnnnnnnnnnnnnnnnnnnnnnnnnnnnnnnnnnnnnnnnnnnnnnnnnnnnnnnnnnnnnnnnnnnnnnnnnnnnnnnnnnnnnnnnnnnnnnnnnnnnnnnnnnnnnnnnnnnnnnnnnnnnnnnnnnnnnnnnnnnnnnnnnnnnnnnnnnnnnnnnnnnnnnnnnnnnnnnnnnnnnnnnnnnnnnnnnnnnnnnnnnnnnnnnnnnnnnnnnnnnnnnnnnnnnnnnnnnnnnnnnnnnnnnnnnnnnnnnnnnnnnnnnnnnnnnnnnnnnnnnnnnnnnnnnnnnnnnnnnnnnnnnnnnnnnnnnnnnnnnnnnnnnnnnnnnnnnnnnnnnnnnnnnnnnnnnnnnnnnnnnnnnnnnnnnnnnnnnnnnnnnnnnnnnnnnnnnnnnnnnnnnnnnnnnnnnnnnnnnnnnnnnnnnnnnnnnnnnnnnnnnnnnnnnnnnnnnnnnnnnnnnnnnnnnnnnnnnnnnnnnnnnnnnnnnnnnnnnnnnnnnnnnnnnnnnnnnnnnnnnnnnnnnnnnnnnnnnnnnnnnnnnnnnnnnnnnnnnnnnnnnnnnnnnnnnnnnnnnnnnnnnnnnnnnnnnnnnnnnnnnnnnnnnnnnnnnnnnnnnnnnnnnnnnnnnnnnnnnnnnnnnnnnnnnnnnnnnnnnnnnnnnnnnnnnnnnnnnnnnnnnnnnnnnnnnnnnnnnnnnnnnnnnnnnnnnnnnnnnnnnnnnnnnnnnnnnnnnnnnnnnnnnnnnnnnnnnnnnnnnnnnnnnnnnnnnnnnnnnnnnnnnnnnnnnnnnnnnnnnnnnnnnnnnnnnnnnnnnnnnnnnnnnnnnnnnnnnnnnnnnnnnnnnnnnnnnnnnnnnnnnnnnnnnnnnnnnnnnnnnnnnnnnnnnnnnnnnnnnnnnnnnnnnnnnnnnnnnnnnnnnnnnnnnnnnnnnnnnnnnnnnnnnnnnnnnnnnnnnnnnnnnnnnnnnnnnnnnnnnnnnnnnnnnnnnnnnnnnnnnnnnnnnnnnnnnnnnnnnnnnnnnnnnnnnnnnnnnnnnnnnnnnnnnnnnnnnnnnnnnnnnnnnnnnnnnnnnnnnnnnnnnnnnnnnnnnnnnnnnnnnnnnnnnnnnnnnnnnnnnnnnnnnnnnnnnnnnnnnnnnnnnnnnnnnnnnnnnnnnnnnnnnnnnnnnnnnnnnnnnnnnnnnnnnnnnnnnnnnnnnnnnnnnnnnnnnnnnnnnnnnnnnnnnnnnnnnnnnnnnnnnnnnnnnnnnnnnnnnnnnnnnnnnnnnnnnnnnnnnnnnnnnnnnnnnnnnnnnnnnnnnnnnnnnnnnnnnnnnnnnnnnnnnnnnnnnnnnnnnnnnnnnnnnnnnnnnnnnnnnnnnnnnnnnnnnnnnnnnnnnnnnnnnnnnnnnnnnnnnnnnnnnnnnnnnnnnnnnnnnnnnnnnnnnnnnnnnnnnnnnnnnnnnnnnnnnnnnnnnnnnnnnnnnnnnnnnnnnnnnnnnnnnnnnnnnnnnnnnnnnnnnnnnnnnnnnnnnnnnnnnnnnnnnnnnnnnnnnnnnnnnnnnnnnnnnnnnnnnnnnnnnnnnnnnnnnnnnnnnnnnnnnnnnnnnnnnnnnnnnnnnnnnnnnnnnnnnnnnnnnnnnnnnnnnnnnnnnnnnnnnnnnnnnnnnnnnnnnnnnnnnnnnnnnnnnnnnnnnnnnnnnnnnnnnnnnnnnnnnnnnnnnnnnnnnnnnnnnnnnnnnnnnnnnnnnnnnnnnnnnnnnnnnnnnnnnnnnn

SEQ ID NO: 255 - DNA, 282 bp, Homo sapiens
atgaacaacttccaggccatcctgactcaggtgagaatgctgctctccagccatcagcccagcctggtgcaggccctcttggacaacctgctgaaggaggacctcctctccagggaataccactgcactctgctccatgagcctgatagtgaggctctggccaggaagatctctttgaccctactagagaaaggagacctggatttggccctcctggggtgggcccggagtgggctgcagcccccagcagccgagaggggccccggccacagtgaccatggt

SEQ ID NO: 256 - protein, 92 aa, Homo sapiens
MNNFQAILTQVRMLLSSHQPSLVQALLDNLLKEDLLSREYHCTLLHEPDSEARKISLTLLEKGDLDLALLGWARSGLQPPAAERGPGHSDHG

SEQ ID NO: 257 - DNA, 3366 bp, Homo sapiens
tgatgaggctgtgtgcttctgagctgggcatccgaaggcatccttggggaagctgagggcacgaggaggggctgccagactccgggagctgctgcctggctgggattcctacacaatgcgttgcctggctccacgccctgctgggtcctacctgtcagagccccaaggcagctcacagtgtgccaccatggagttggggcccctagaaggtggctacctggagcttcttaacagcgatgctgaccccctgtgcctctaccacttctatgaccagatggacctggctggagaagaagagattgagctctactcagaacccgacacagacaccatcaactgcgaccagttcagcaggctgttgtgtgacatggaaggtgatgaagagaccagggaggcttatgccaatatcgcggaactggaccagtatgtcttccaggactcccagctggagggcctgagcaaggacattttcatagagcacataggaccagatgaagtgatcggtgagagtatggagatgccagcagaagttgggcagaaaagtcagaaaagacccttcccagaggagcttccggcagacctgaagcactggaagccagtgcctttctccagttcctcgttgagctgcctgaatctccctgagggacccatccagtttgtccccaccatctccactctgccccatgggctctggcaaatctctgaggctggaacaggggtctccagtatattcatctaccatggtgaggtgccccaggccagccaagtaccccctcccagtggattcactgtccacggcctcccaacatctccagaccggccaggctccaccagccccttcgctccatcagccactgacctgcccagcatgcctgaacctgccctgacctcccgagcaaacatgacagagcacaagacgtcccccacccaatgcccggcagctggagaggtctccaacaagcttccaaaatggcctgagccggtggagcagttctaccgctcactgcaggacacgtatggtgccgagcccgcaggcccggatggcatcctagtggaggtggatctggtgcaggccaggctggagaggagcagcagcaagagcctggagcgggaactggccaccccggactgggcagaacggcagctggcccaaggaggcctggctgaggtgctgttggctgccaaggagcaccggcggccgcgtgagacacgagtgattgctgtgctgggcaaagctggtcagggcaagagctattgggctggggcagtgagccgggcctgggcttgtggccggcttccccagtacgactttgtcttctctgtcccctgccattgcttgaaccgtccgggggatgcctatggcctgcaggatctgctcttctccctgggcccacagccactcgtggcggccgatgaggttttcagccacatcttgaagagacctgaccgcgttctgctcatcctagacggcttcgaggagctggaagcgcaagatggcttcctgcacagcacgtgcggaccggcaccggcggagccctgctccctccgggggctgctggccggccttttccagaagaagctgctccgaggttgcaccctcctcctcacagcccggccccggggccgcctggtccagagcctgagcaaggccgacgccctatttgagctgtccggcttctccatggagcaggcccaggcatacgtgatgcgctactttgagagctcagggatgacagagcaccaagacagagccctgacgctcctccgggaccggccacttcttctcagtcacagccacagccctactttgtgccgggcagtgtgccagctctcagaggccctgctggagcttggggaggacgccaagctgccctccacgctcacgggactctatgtcggcctgctgggccgtgcagccctcgacagcccccccggggccctggcagagctggccaagctggcctgggagctgggccgcagacatcaaagtaccctacaggaggaccagttcccatccgcagacgtgaggacctgggcgatggccaaaggcttagtccaacacccaccgcgggccgcagagtccgagctggccttccccagcttcctcctgcaatgcttcctgggggccctgtggctggctctgagtggcgaaatcaaggacaaggagctcccgcagtacctagcattgaccccaaggaagaagaggccctatgacaactggctggagggcgtgccacgctttctggctgggctgatcttccagcctcccgcccgctgcctgggagccctactcgggccatcggcggctgcctcggtggacaggaagcagaaggtgcttgcgaggtacctgaagcggctgcagccagggacactgcgggcgcggcagctgctggagctgctgcactgcgcccacgaggccgaggaggctggaatttggcagcacgtggtacaggagctccccggccgcctctcttttctgggcacccgcctcacgcctcctgatgcacatgtactgggcaaggccttggaggcggcgggccaagacttctccctggacctccgcagcactggcatttgcccctctggattggggagcctcgtgggactcagctgtgtcacccgtttcaggtggggtgaggggcttggggaagagacatccttgtgttgggcattaactgcggtcttggtgccaagcccagtgctctgtggggtctcttttagtatgcagagcagccgggtggggcagaatggattgtctccatttttaagatgaggatgttgaggctcagagaggggcagccacttgccacacagcaagtgagaggcaatggcattctcccagtcaatatttgaaggcccgccatgtgccagtcactggggtatgtctagaatctgagactgacctgggctcaaatttgttttattctttccaccccctgagcacgccaccgttttcttatgctaagagtaaagccatggcctccccttggactctctgcctccattctctcctcttccactccattttgtattcagcaaccagaccaatcttctcagaacttgaatctgattgtatcccatccctgcttacaatccttcagggacactccaccactgtcaggatgaaggctaaattccttaatttggtttcattaagtcggtctgcaatctgcttgagcatttcagcttaatcgccagaggattgcttccatatttccccctaaacatactttacccaagctgtaagatcctacataattgtgccaataatttagcagtgagcttcctggtagccgaagcaaaaagggaaagaaaaccactgtgtgagttgtgagaaagtaggaatcaataaaggctggagtggtc

SEQ ID NO: 258 - protein, 879 aa, Homo sapiens
MRCLAPRPAGSYLSEPQGSSQCATMELGPLEGGYLELLNSDADPLCLYHFYDQMDLAGEEEIEKEPDTDTINCDQFSRLLCDMEGDEETREAYANIAELDQYVFQDSQLEGLSKDIFIEHIGPDEVIGESMEMPAEVGQKSQKRPFPEELPADLKHWKPVPFSSSSLSCLNLPEGPIQFVPTISTLPHGLWQISEAGTGVSSIFIYHGEVPQASQVPPPSGFTVHGLPTSPDRPGSTSPFAPSATDLPSMPEPALTSRANMTEHKTSPTQCPAAGEVSNKLPKWPEPVEQFYRSLQDTYGAEPAGPDGILVEVDLVQARLERSSSKSLERELATPDWAERQLAQGGLAEVLLAAKEHRRPRETRVIAVLGKAGQGKSYWAGAVSRAWACGRLPQYDFVFSVPCHCLNRPGDAYGLQDLLFSLGPQPLVAADEVFSHILKRPDRVLLILDGFEELEAQDGFLHSTCGPAPAEPCSLRGLLAGLFQKKLLRGCTLLLTARPRGRLVQSLSKADALFELSGFSMEQAQAYVMRYFESSGMTEHQDRALTLLRDRPLLLSHSHSPTLCRAVCQLSEALLELGEDAKLPSTLTGVGLLGRAALDSPPGAELAKLAWELGRRHQSTLQEDQFPSADVRTWAMAKGLVQHPPRAAESELAFPSFLLQCFLGALWLALSGEIKDKELPQYLALTPRKKRPYDNWLEGVPRFLAGLIFQPPARCLGALLGPSAAASVDRKQKVLARYLKRLQPGTLRARQLLELLHCAHEAEEAGIWQHVVQELPGRLSFLGTRLTPPDAHVLGKALEAAGQDFSLDLRSTGICPSGLGSLVGLSCVTRFRWGEGLGEETSLCWALTAVLVPSPVLCGVSFSMQSSRVGQNGLSPFLR

SEQ ID NO: 259 - DNA, 6710 bp, Homo sapiens
cttggcgggctcccaactggtgactggttagtgatgaggctagtgatgaggctgtgtgcttctgagctgggcatccgaaggcatccttggggaagctgagggcacgaggaggggctgccagactccgggagctgctgcctggctgggattcctacacaatgcgttgcctggctccacgccctgctgggtcctacctgtcagagccccaaggcagctcacagtgtgccaccatggagttggggcccctagaaggtggctacctggagcttcttaacagcgatgctgaccccctgtgcctctaccacttctatgaccagatggacctggctggagaagaagagattgagctctactcagaacccgacacagacaccatcaactgcgaccagttcagcaggctgttgtgtgacatggaaggtgatgaagagaccagggaggcttatgccaatatcgcggaactggaccagtatgtcttccaggactcccagctggagggcctgagcaaggacattttcaagcacataggaccagatgaagtgatcggtgagagtatggagatgccagcagaagttgggcagaaaagtcagaaaagacccttcccagaggagcttccggcagacctgaagcactggaagccagctgagccccccactgtggtgactggcagtctcctagtgggaccagtgagcgactgctccaccctgccctgcctgccactgcctgcgctgttcaaccaggagccagcctccggccagatgcgcctggagaaaaccgaccagattcccatgcctttctccagttcctcgttgagctgcctgaatctccctgagggacccatccagtttgtccccaccatctccactctgccccatgggctctggcaaatctctgaggctggaacaggggtctccagtatattcatctaccatggtgaggtgccccaggccagccaagtaccccctcccagtggattcactgtccacggcctcccaacatctccagaccggccaggctccaccagccccttcgctccatcagccactgacctgcccagcatgcctgaacctgccctgacctcccgagcaaacatgacagagcacaagacgtcccccacccaatgcccggcagctggagaggtctccaacaagcttccaaaatggcctgagccggtggagcagttctaccgctcactgcaggacacgtatggtgccgagcccgcaggcccggatggcatcctagtggaggtggatctggtgcaggccaggctggagaggagcagcagcaagagcctggagcgggaactggccaccccggactgggcagaacggcagctggcccaaggaggcctggctgaggtgctgttggctgccaaggagcaccggcggccgcgtgagacacgagtgattgctgtgctgggcaaagctggtcagggcaagagctattgggctggggcagtgagccgggcctgggcttgtggccggcttccccagtacgactttgtcttctctgtcccctgccattgcttgaaccgtccgggggatgcctatggcctgcaggatctgctcttctccctgggcccacagccactcgtggcggccgatgaggttttcagccacatcttgaagagacctgaccgcgttctgctcatcctagacggcttcgaggagctggaagcgcaagatggcttcctgcacagcacgtgcggaccggcaccggcggagccctgctccctccgggggctgctggccggccttttccagaagaagctgctccgaggttgcaccctcctcctcacagcccggccccggggccgcctggtccagagcctgagcaaggccgacgccctatttgagctgtccggcttctccatggagcaggcccaggcatacgtgatgcgctactttgagagctcagggatgacagagcaccaagacagagccctgacgctcctccgggaccggccacttcttctcagtcacagccacagccctactttgtgccgggcagtgtgccagctctcagaggccctgctggagcttggggaggacgccaagctgccctccacgctcacgggactctatgtcggcctgctgggccgtgcagccctcgacagcccccccggggccctggcagagctggccaagctggcctgggagctgggccgcagacatcaaagtaccctacaggaggaccagttcccatccgcagacgtgaggacctgggcgatggccaaaggcttagtccaacacccaccgcgggccgcagagtccgagctggccttccccagcttcctcctgcaatgcttcctgggggccctgtggctggctctgagtggcgaaatcaaggacaaggagctcccgcagtacctagcattgaccccaaggaagaagaggccctatgacaactggctggagggcgtgccacgctttctggctgggctgatcttccagcctcccgcccgctgcctgggagccctactcgggccatcggcggctgcctcggtggacaggaagcagaaggtgcttgcgaggtacctgaagcggctgcagccagggacactgcgggcgcggcagctgctggagctgctgcactgcgcccacgaggccgaggaggctggaatttggcagcacgtggtacaggagctccccggccgcctctcttttctgggcacccgcctcacgcctcctgatgcacatgtactgggcaaggccttggaggcggcgggccaagacttctccctggacctccgcagcactggcatttgcccctctggattggggagcctcgtgggactcagctgtgtcacccgtttcagggctgccttgagcgacacagtggcgctgtgggagtccctgcggcagcatggggagaccaagctacttcaggcagcagaggagaagttcaccatcgagcctttcaaagccaagtccctgaaggatgtggaagacctgggaaagcttgtgcagactcagaggacgagaagttcctcggaagacacagctggggagctccctgctgttcgggacctaaagaaactggagtttgcgctgggccctgtctcaggcccccaggctttccccaaactggtgcggatcctcacggccttttcctccctgcagcatctggacctggatgcgctgagtgagaacaagatcggggacgagggtgtctcgcagctctcagccaccttcccccagctgaagtccttggaaaccctcaatctgtcccagaacaacatcactgacctgggtgcctacaaactcgccgaggccctgccttcgctcgctgcatccctgctcaggctaagcttgtacaataactgcatctgcgacgtgggagccgagagcttggctcgtgtgcttccggacatggtgtccctccgggtgatggacgtccagtacaacaagttcacggctgccggggcccagcagctcgctgccagccttcggaggtgtcctcatgtggagacgctggcgatgtggacgcccaccatcccattcagtgtccaggaacacctgcaacaacaggattcacggatcagcctgagatgatcccagctgtgctctggacaggcatgttctctgaggacactaaccacgctggaccttgaactgggtacttgtggacacagctcttctccaggctgtatcccatgagcctcagcatcctggcacccggcccctgctggttcagggttggcccctgcccggctgcggaatgaaccacatcttgctctgctgacagacacaggcccggctccaggctcctttagcgcccagttgggtggatgcctggtggcagctgcggtccacccaggagccccgaggccttctctgaaggacattgcggacagccacggccaggccagagggagtgacagaggcagccccattctgcctgcccaggcccctgccaccctggggagaaagtacttctttttttttatttttagacagagtctcactgttgcccaggctggcgtgcagtggtgcgatctgggttcactgcaacctccgcctcttgggttcaagcgattcttctgcttcagcctcccgagtagctgggactacaggcacccaccatcatgtctggctaatttttcatttttagtagagacagggttttgccatgttggccaggctggtctcaaactcttgacctcaggtgatccacccacctcagcctcccaaagtgctgggattacaagcgtgagccactgcaccgggccacagagaaagtacttctccaccctgctctccgaccagacaccttgacagggcacaccgggcactcagaagacactgatgggcaacccccagcctgctaattccccagattgcaacaggctgggcttcagtggcagctgcttttgtctatgggactcaatgcactgacattgttggccaaagccaaagctaggcctggccagatgcaccagcccttagcagggaaacagctaacgggacactaatggggcggtgagaggggaacagactggaagcacagcttcatttcctgtgtcttttttcactacattataaatgtctctttaatgtcacaggcaggtccagggtttgagttcataccctgttaccattttggggtacccactgctctggttatctaatatgtaacaagccaccccaaatcatagtggcttaaaacaacactcacatttattctgctcacatatctgtcatttgagcagggctcagcggggacagctccttctgtcctactctgtgtcaggtggggcagcttgagggttgggctggtgtcacctgaagactcattcttctgtacgtctgacaggcaatgctggctgttggctgggggcctcagtgccactacggaatagttggctaggacccctccatgtgggctagttgggcttcctcatagtatggtggctgggttggagggtgtcccaaaaagaaaggaggggatagagagagaccacttttcataacctagccttagaagtcacacagtattacttctgctacatatatatgttttaagaggcagggtctcactctgtcgcccagtctggaatgcagtggtatgatcacggctcactgcagcctcaacctcctgggctaagtgatcctcccacctcagcctcccgaatagctgggactacaggtgtgagtcaccaagcccagttaatctttagttttatttttgtagagccagggtctcactatgttgcccaggcaggtcttgaactcctggcctcaagtgattctcctgcctcagcctcccaaagtgctgggattacaggtgtgaaccaccacacccagcccacttctgccatattctgttggccagtgtgacaaggattgctactgtcctacccaccctcctttcaccacatgtgcacatgcacgtgtgtgcacgtacacacacatacacacacacgcgtgcacacaccagagcccaccttggctcaagtcctcttttctgagaggacttttctttgtggcttcctaaaattcagtggaaaattaattgtttggggatgagaaaggttgaagcaccaaaagcttaccaaggggaatgtttgcctctgcctctgacacacagctctgtcctgggagtgagctggtttttagcggagacggagtcccaccttggctgcagggagtccgaaagggacttggaagctccgctttctacccagcgagcttactcctggtggcagtgggagctgcctgttcagctccagctcaccagccccagtgcccacaggatcagtctgattcccaagctctgctcctctccccagcaagtgagagctgggtgtcaagagggtctgaggaatccagacccggctgcgtggttgatgatctttgcagacaggcaagcacctcctgcctcgaactggctgcaaagggtatcaggtgctgccatccaggttcagcttgtaaatagctcaggtgtcaccctgcaagggatccctgcacttgcagactctacagaggccatgggcctcctgtgtgtgcggctacaggagtgagcactgaggtgtgctctgatcatccactgtgccatgtgccaggtttttggtctgacccactgcttttggtctgtgtgatgatgaaatgaggtcagagcctgcagttattaacactaacgatttgttaatgatagctactgtttattattttatttaatttttttgagacagagttttcactcttattgcccacgctggagttgcagtgagccgagatcacgccactgcactatagcctaggtgacagagtgagactctgtctcaaaaaaacacaaaagtttctcttttcaaaacattttactttaaaaggagccaatttaaagaaaactgttaatagttcaggtaacaggcagatacaggaaaagctgctgacagtgttgtatgaggtttgaggattttgatccaagctggtcccactcagtccatagcagagaatgaaagggcccagagagggtggtgacctctgcctgaagtcacacagtgagtcgaggacagggaggtgaccccaggtttctatgtgtagggcgggaggatgttctgggacacagttcaattctcatttgtcacacactttggctattagagatcaaccccttcgctcctgtgtcttgcaatggcagccttggcaaacgctaaatgaaaatcgtgacaacacttgtgttatgaagcatttactttgtgttcaccttgt

SEQ ID NO: 260 - protein, 1122 aa, Homo sapiens
MRCLAPRPAGSYLSEPQGSSQCATMELGPLEGGYLELLNSDADPLCLYHFYDQMDLAGEEEIEKEPDTDTINCDQFSRLLCDMEGDEETREAYANIAELDQYVFQDSQLEGLSKDIFKHIGPDEVIGESMEMPAEVGQKSQKRPFPEELPADLKHWKPAEPPTVVTGSLLVGPVSDCSTLPCLPLPALFNQEPASGQMRLEKTDQIPMPFSSSSLSCLNLPEGPIQFVPTISTLPHGLWQISEAGTGVSSIFIYHGEVPQASQVPPPSGFTVHGLPTSPDRPGSTSPFAPSATDLPSMPEPALTSRANMTEHKTSPTQCPAAGEVSNKLPKWPEPVEQFYRSLQDTYGAEPAGPDGILVEVDLVQARLERSSSKSLERELATPDWAERQLAQGGLAEVLLAAKEHRRPRETRVIAVLGKAGQGKSYWAGAVSRAWACGRLPQYDFVFSVPCHCLNRPGDAYGLQDLLFSLGPQPLVAADEVFSHILKRPDRVLLILDGFEELEAQDGFLHSTCGPAPAEPCSLRGLLAGLFQKKLLRGCTLLLTARPRGRLVQSLSKADALFELSGFSMEQAQAYVMRYFESSGMTEHQDRALTLLRDRPLLLSHSHSPTLCRAVCQLSEALLELGEDAKLPSTLTGVGLLGRAALDSPPGAELAKLAWELGRRHQSTLQEDQFPSADVRTWAMAKGLVQHPPRAAESELAFPSFLLQCFLGALWLALSGEIKDKELPQYLALTPRKKRPYDNWLEGVPRFLAGLIFQPPARCLGALLGPSAAASVDRKQKVLARYLKRLQPGTLRARQLLELLHCAHEAEEAGIWQHVVQELPGRLSFLGTRLTPPDAHVLGKALEAAGQDFSLDLRSTGICPSGLGSLVGLSCVTRFRAALSDTVWESLRQHGETKLLQAAEEKFTIEPFKAKSLKDVEDLGKLVQTQRTRSSSEDTAGELPAVRDLKKLEFALGPVSGPQAFPKLVRILTAFSSLQHLDLDALSENKIGDEGVSQLSATFPQLKSLETLNLSQNNITDLGAYKLAEALPSLAASLLRLSLYNNCICDVGAESLARVLPDMVSLRVMDVQYNKFTAAGAQQLAASLRRCPHVETLAMWTPTIPFSVQEHLQQQDSRISLR

SEQ ID NO: 261 - DNA, 215248 bp, Mus musculus
  misc_feature (1)...(215248): n = A,T,C or G
ttcaaaagtatttttattactgttttgatgtacagtcttactacaactattagctggcctcaaattcataatcttcttgcctctgtctaactatgaaaaaataacccagcacttgtaattttaaaaaggtaatggggtaatgtcaaggagacagtgaagaggacacctatagccagagaaaggaaaaagcaggaaggtcaaggtgccgtgagcctgactcctccgctccctccccgggattcctgcagcctagcacctcacttcagaaactctgggtactgtggatggctcatagctgggcatctaacacgggtcactgaactgccccaagcctcagtttccctccaagtgaccatcccaaggtgatgcagggaagctctgtgccagaggcacccagttctagcctctcagccaagctcccttcccggcaggaagcctgaggaggaggccttcctttagggatgagggatgacagctgcaagcgcatctcagctgactctcagtgggtaccaagcatcaccaagcccagtctgcttcacaggcagtccacagtgatgctctcttctagttactggccccagaagagcaaggaaccccaataaaggggggtcctggggtaggggtcccttggtctaacacatccaaagtgttggtagaactggggtttaaaccccaaatgtgtgtgactataaaaactttaggaaaccattttaggggtcacgtgagctggctgaagcaatcatacatccataccaaacacagattgctctgttgctcttggtcaggccttactacttctcagagagagttctaggttggtgctgggaactttcatctagcagcactagctcaacacataaagcagttcccagccctcaccattagctggcttcttcttgtggtgacatagcattcacttaaaaatagatccatgcagtctaggcgtgcgcctcagtagtaggatatgtgtttaggatgtgtgaggtactgggctggatcctcagaaaaacctaaaaaacagtaaaatacagtcaagagggcctggggccagagtttagttggcagagtgctttcctagtgttcacgaagcgctggtttctatccacctacactggcactgtgggacacatctacacccataaagcaggcacagtgacccgagactacagccccagcatttgagaggtggaggcagcaggagaggaagcccaaagccacggcagctagacaggaagtacagggccaaacaaagtccacatgagaaaggacgctttttgttgctgctgttctttagtttgtttgtttggatttgttttgttgttggtggtgggttttttgtttgtttgtttgttttgttgttgctgttgttgttgtttttgagacagggtttctatgtgtaaccctggctgacctggaactcaatctgtacaccagcctggccttgaactcagagatcctgcctctgcctccagagtgctgaggttaaagatgtgccgacctttttttttttttttttttttaaaccaaggagcactaaaactctaaggaaaagcattatttaccttaaactctaaaaggaaaagcagtaactcgcagtagagagacctgacacatatcaccaaagctcacagggccagcatggtacagggggcgtgtggctttcagaattctgtactgaggacacacattttcctgccaagatcacatcacctgaatggaatcctgagctcagacggacacctgacaaccccaggcagagacagctggcaaacgccacaccagcctcttgcacattgccaatgtcacacccagacatagacagactgagcatttggtccagaataaagaaagcagtgacctcaaagcttacacacttatcattgaaggacatttctgggacatcaaaagctgtgaataaagccagagagcaaagtgctcctaaatcctatccctgtccagctgctgatttcagccaggtgtggtggcacccaactgtaatccagcacttgggagacagagcaggaggatccggagttctaggccagtcttgattatagaagactccatctctaaaaacaatgacatcttgctggctttgacaaggacactacagataccaagtagatccttcttttaggaaaatacagaccaaaatattcaggaccagaggaacatcatgtctgcaatgcactctcaaatggtttagaacatgaccatccacatgtgtatgtgtgtgttcacatgcatgcataggtatgcacagaggagaaagtgagcttgctcttagcaaatgagcagaaatgctggctgccaggcaggctctgctgaggggagcatgggagttctttatacttttcttgtaactttgctgaaagtgtggaactctaaaatttttctaaaagattttttttatgaggaattcaggattaaaggagcaagcatgtagatgaatgggcctggtgaggccatgactggtgctggaagtgggcatgggagatggccggtcatggggtcatggaaggctcttctgctccctggtggccactgtgctgtgcaggagacacagccatcttatttggctttggtctctggacccctcactttctagtcttcagtttctttacttgcaatgctgagttacctcagcagtcaagaggcaggggcaagaagatcctgaatttgaggccagttggagccacacagtgagatcctgtctcaaaaaataaaaagtctgtgtctttcaatgtgattttgatttcccaaatgcagctggtgttctcagaagttccaggatgaaggcagcagtaatagctgactgaagccctcctgtttttcattcagctaaacagatcccagggctgggaggagagtgtgatatggaggcccaacttttctggctggaatctccaggctgggctaattcagagccacagccatgaggccattggcatctcagctggcctggagaccttttcttcccaaagggatggccaggactactgaagcactgtgaccagggccccctctgtgtgtctcttgagtgagagcaaagcatgtacctgcccccacacctctagaccctctagccttagcttccttcctgttgttctgcatcttccctcaccctgatccgggtccacaggctaccagtaggtctcccacaactgaaatctgaatatatggctgtctccatagaagtagtgggcatcccagctgggcaataccatgctctgctgggtgttctgttgacactgcaggctatagtctgacaagaaaggctaagaaagtagtcatggtcctcaagtgagccatctgaggcctgagagtaagccttattcggtcacccttattgcacagccacactgtaccagaccacacagactctggtggcatcatccccattcccaggcgagagactgtgtctcttctacagtacctcatatgtcaagggaggtccagtgggcaccctcacctgttacacgactctaaagtaattaaccaggctaaggtgtttctctaacctagcagatgggctgtcagcaatccccaccccaattctctctctctctctctctctctctctctctctctctctctctctctctctctctctcacacacacacacacacacacacacacacacacacacacacacacacccctaaggctccaaggccatgtacccaatcacctctcccccagcaagcaaggagttccatcccctactcccccaggccacaatgaacactctacagaaaccacagaggccactttccagagctctagaaccagtgccctggggattatgggcatgagaataggaagacagaggtaggggtgtgtgtggagtgtgtacaccaatgggcatgttgtctgagcccattttgttagtctctggtccttttgttagtcatgagacatgaatattaatgcacaaggcaggtgagggcagataattccagactgcaccgacctgtctataacagcagttgatattcatggaccagttaccatgcaagaaggtccaattctttgtcctctcaacgaggcaaattttcattattcctgctttataaaagaggccaccaatatgtagagttaaatggcattcccaagactgtggctagacctgcaatttgaattaaaaaatctgagtttagagttactgctctgaagctggattgactcctcaaataggtgctcagtaaatgtataataagttagacaccagaggtgaggagcaaaagtggaggtccttgttcttgccgtgattcaccccagcccccacgacctcgtgtgtcctggtctggcttgttaaaacatgactgggagcaagcatgcctggcccagggctcctgtgtttggaaagggtcaagaggcaaggttggtcacttcattctaggtttgtatcagtcatccctcctgcatcctctgggacttgcctttctggccctgggaccaaagtcttctatcttggatggggggacaggtagtgtggtgtgtgggcttcatcagtctccatcccttaccttccctaccccccaaggtcagccaagagtgtcccaaaggaacgcttcttggtgtttctgctcacacagcagttgttgtacagcatgtcaaagcatttgggctctggttttgagcttagaatatgccaatgttttcagttggaagcaggaatgtttctgctgatatggtaagaagataaaataagacattttcaccaagttatactgcctgagagtctacttggctcaaagacagaaatgtaacatgggatcacaggggccgaacctagacgctgtgagaagaaggagggacagtgcttgttgtatgactacgtgagaacattcagaaggcttagaagcaggactggtctgtggtctctacacaggttctgaatgggtcccagggattctatctctgttaggtgttcccagtgtggccttgtccagtcacctgtcacctctggctagacaactaacaacatcctcactggcctccctcctcctacccttttatttagcccattctgttcacggctgccagtcatctgacagaacatgagctggactgtgtcatgccctgcctgggaccatcactggatgctaactgcttttggctatgtcatctatggtccgccactgacctcttttccaagtcctatctccagcctcccttcggctgctgaatgagccatgcctttcccagcccgaggtatgggtactgacaaatccctcaacccagactgctttgctccagaggtatctgtctggctccttctatcaattctggcctcagctcatatctgccatcccttcagagagaccttctcccactctctagttagagcagcctgtgcctattctcctctcatggtcatttcgtacagaccatctgccagaggccggttgctggacaaacagtagcgaacgcatcaatacagcctctaaacttcccattcctcactaggtttctaggtacccacgtgtgttcctcctggaaggcctgcatgccaggttccatctgcctttgctcaccgagaactcaacaaataggtatctgttcaatgaaagagtggatgtcgggctggcaggaacgtgaagagctggtgcatgccctgcctcgaacttggcacctgtgtggataccactagacttactaaagactccttcaaagatatcacgccttgttcccaagaatttccctcttaccatgcattatttccacaacagacagacgatgtgtccccaattccactgttgaaagcctgttcctgcagtgatggtgttaggggtgattaggtcacaagggtggagccctctagtgggattagtgccctttagaaaactatgaggatgaaatgcttgttgtttgagccatggttttctggcacagtaccccaatctaagacacccacttatggcaatgttggcaatcaggtaacacgggagaggaggcgtgaatgcttccttggggtgacatcagtatctgttatctaaaaggagcccccacccaccagctccacgtgcctcctcattgccacttgggctctatgacctgccaaaccccagcattccccagctatagggctaggcccgccccgtgacacctcaacggacccaacagcttgcctggcacaaacgttctctcatacaggccagctgttccctttcccttgttgggagacttcagccagtcttggattcactttatcttttctaacatataacaaaacttcttggcagaagcccaaaggcacgtcttcagtacgaccaccccgtggttccttctgctgaccctagggtgctgagaggccttgcaaatactgcagacaaagccagcaccagctcagaactgcctacctgtcccagagcggcagcctaagaaactgacagcctctgcggttctgagctgcagtaccaacaacccaggatctctgaaacctgactccaaatacagcagcagaaacactgccaaaaggaagtgcggcagtgttgtttgctgaaggtttccattctcccaggcttggcctgaagcccctcagtttaactggtccctcaagaggccgcagaacaaaagtgaccagtgcctcttttgacaccagtctatgctttcaggacaagtaagcatccccccaaaccccaaggtcaccaacaagacaggctaagacttgggggaggagctgacagctccacctcaaaaggttttgggtacaaagcttttacccaagccatggggtaaactgcatgattactccaaatgttcatttctttgggggaaatctcttcaaacactactattcctagcatctgagttagatccagaggaggtggccagagaaatcagaggcttagaggaaggaggttagtctgccctgaggacactaccttctctctccccgaaatacacccccatctcaagggcacttacgggcctcttcctggggtcccatccctgtccagatggtgcccccaaccagtggcagcggcatggtacgggcggctggtccaggccaagagttgcggatggtggaaggcaagtggggaacagtaatcacgacattattccaaatatccatcgaagacgtcaagctctgagtcggcatcgtaaaggccagagccagggtctgaaagtacgccgaggtccaccagcgcctggtccaagtcctcgggcaggaagacgaggcccacattgagaacgatgtattccataaggaaggcgtagtaaaggatcagcacattgacgaagaacaggcccacgtagaacatagagggcagcagcggtggctgcacgtaggagaccagggggcccagagcgtccaggtgggctgcgacccgggcgccgggcatgcaggggccggcgatgggggcggcggccgggcgatcccagcgacctcagccgctgcggcgcccgggcggccggcgagggggcagctcagccatccagggggcgccccggggctcggtggcggcagcgctgggccccgggcggcctccgaagacgctccttgacaccccgagatgctcagggccgggtcacggagccccgggatcgggccacacgggccgctcgcccctcagggccacccccctagaagtggccagcgactcgctttgtacgctgcgctcgcgcgcccccgccgcagctcagagttgaggccgctgctgtctccccgaggcgttcctcaggcaccttcggcgcccccgcaggctcactgcccatcgctgcagccgccaagtcgctctgggcttcccagcaccgcctacccagaggctcttcattcattggccagtcgcatgctcgcccgtatttattggctagctcagtgctccacgtttattggcttgagctgtccgggggcgggtactcatttgctccgccccatgggaggtgctccagtctctaagttgctcttctgcagttggcactccttagactgcatctcgaacttaggtatggagcgtcacctttttggaacttagtttaccccctttaaaatgatgccgggtggaaaaggaatgccggtaattccactgaaaatcttagatatccccaaagcgcttttgttgttttctttttcacggtatagtaagaaaaaaaaatcaattactgagtgcctttgacagaggcattatagggttccatgacacccggatggaaagtaccacaagcaggtcaaatcttctgccaataaggctgcttattgtttctattattttgcagtccatgtttaaaaccaaccaaccaaccaaccaataatgctaagtatatatctgctcagattcttcggtttacagaccacctttgtgcttcgtcaggaggatgagtttgcgagggatcaaaaccaaggtctgtgtgtgcaagatatagacgagatgtagctctacatctgtttttgaaaacaacaacaacaacaacaacaacaacaacaacaacaaaacccaaaccctgaaaacccagggtctcaccatgaagcctctgggtgccctgaaattggctatagaccaggctgtcccagaacatgtagagttccactgcctctgtctcctgagttctgggattaaggtctatcctcaattcttacaaaggcctttaatctaagtcacacttaggtttataggagctggacaaggcaatgtagtatattcccttttcacagatgaggaaaacaaattccagagaaatggattctcgaagctgctgagtctctgtcatttcctttggaggtcagacatgttcttgttctttcatgacttttacatgggaaaccattagcctgatgccagtctacatctctctaattcttggaagcaatgcaaaccattcactctatcaatattcatctaaaaacgtgctatgtgcaaatcttgtcctgggccctggagagaacattggtccctgactcaactcttttcctaggacagtcaatgggctgtcacaggggttaaatagctatgagatgtagaaatgaataaatgagagggtgtggggcacaaaatcttgcttcccaccgaggttcccacttccagtctgggaaggaagtccaggtgtatgtaacctttcatggagatcttggagttctctttctttcttactgaattagttgggaaatggcatgagttttcaataatgaccagaggaaacctctgaaagttcatcgtggttagctttacaatgctgctcacatctttacaaaatgttttaagactaatgtgcaaaagaaaaaggttgtaaggacaaaccagaatgttactgattggttttgtcaacagaagcaaataagggtacctgggcttgaatcctgcgtctgtcacacataaagtgcctctgtgactcagtttcctgaattgtaaaataaggttaataacagcatctacttcatatggttgtgagaattaaataattaatcacttaggataatgacaaatgataatgtactactcaatgctttttatttttaattcttattattgcgatattgaaggttgcatccataatgcataagccacattcccacccctttaaaaaatttttttaaagagttagacccatcaaaatggctcagctgttaagcaaagatgctgacaagtctgaagatccgacttcaattctcagatctcaaatagtggaaggcgagaacttgctttccaaagttttacagactctaagtgcgtgtgtgtgtgtgtgtgtgtgtgtgcgcgcgcgcgcgcgcgcacgcgcacgtaatactttttaagagaactaaaccttgccaaattgccaagggtggtctccaattttagctggggtttcgagacactcttctaatcacaaagctaacaataaataaggtcagatagtcttactccgatttcagcaaaccgtttccgcccaccttgacagtgcccagcctcttccttcctcttgtcccgcctcctctggacggtcgcgcgagtcatgccggtccttgtagtccgttcgcagagtcctgtcgtcaagagcctcgccggagaacttcatttcccagatttcctcgcggcggcggccgtaaagcgcggcggtcgaacggccggttccggctgaatgtcagtgcggggctttgggctggggagcaaggtgcttggcagtctctccaccgcccccgccgccgctggctgggcttgagatgtcgccgcggacaccgggccgctgggcggctcggacatgaaaccgtgaggcaggcgacagggctggtctgcggacatgtttggacgctcacggagctgggtgggcgggggccacagcaagtcctcccgcaacatccactccttggaccacctgaagtgagtgtgcggggcgcgcggcgggaaggccgcggggccgggcgcggacgcccagacgcgggcttggcttgcggggctcggaggtgcgaggaagacaggggtgccgcgggagggttgtatgttggttatccgcaaggctttggagtcagggcacctggcttcgaaccctgactctttcacttctggctctgtgtgtgaccttggacaagtcgcgtgatttttcagtctccagacacctaacctgaaaagtaagggcatcgttgagttttcgttttgtgggctggagttgtcttgatgtcccggggacagacagtggccactgggcttcttggggtagcacttcttggactgcatagttacgaggccattgacccggccagatctggattcgattttagttaacagtatgcatttaggcttcagtttccttcactgtaaaacgaatagagtgacagtaccactttttgtggttatttttaggattggttggataagagaatgaagaaaacgcacagaacatgtacaagtgctctaaaaagaacattgattaaaagaacacaagtattttcagaaggaattctagagggatagtcagcagtagcacctttagagaagacaggaggcttacagagtcctggggaaacagggaagtacacagaagaggctagctttggagttagacctgtgttcaaatcctgacttaatgactgtagctttgggcatattttctctctctgtccttccaatttgccattaccagctgggaactgggaactgtacaagaattgggtaatgttgagcatgttaagtgattgattcaggattgctctacaggagtggctaacagaggcactcaagccttcccagcccattccagttcctttctgtctctaagttccagtcattatacccttgctgtcttctgtggctctgtttattttcacttcctttctagcttttgttaaactgacactcccaagacgggagaacctgcttggtttctttgcacttatattgccagaggattggaagggactacaaagagagagtggtagaagacagagaccttagagaaatgagaggctccagggagagaactggaggtggaggtaccaagggggggcggagaaggcagtttcagaggggaccccagaagctttgtatggggacaggaagatagtgcggtaacaacagaaaggaagacaggggtccctagaaaagattggcaagctaaaaattagatgggacttcccctttgatgttggggtgtagaatggcttctttctgtcatggagcaaggatttagtaaatgtttgtaaatctccaaatgtgaagagctggatgatttgggggtggagaggaaagaggtagagggcaagagtgggggttggtagcaattcagaaatcttaaccgggatggcagatggcccggaaagggagtggggtgtggataagtggctgtgaaggggaggatgattgtcccgaggggctgggtgtcctaccagcctaagcacctgctggctctcacttcacttgggactgtagcccctttaaattcccattattgtgttactttgcctggttaaggatttcctgtttgttttattcatcacaagtctatgagtttgattgtgtcctatatagatagacttaggatccaggtagcttaaggcaagtttcaattctggtttctttgttataatgtctttctggataaaacttcttagtttgaggaaacttttgactgggctgcatgtgatggccaatgggacatttttgctggccaacaatggacacctggtaatgtaaaggacctcaggtcccttcctgataccctgggaatgtctctggttcacttcagaggtcctgggaaaaagagcttgcccaccttaattcaggctgctctgtttattccctttcacagcttcaggaacctgggtattgattggcacaagacctagaagatccaaggtgacttggaaagggggctgcagacatctagtgcctaccccagtgcttgtgctgccttcatctgcattctgagtaccaactcctgggggagactgctagctgctgctaggagaccacagtggagccaggactcttcagtgtgtcaaatctcgggactctagtggtcccaggggtctgtagaattcctttatagaagctttctggaggaggcaacactgtatcagagatcccctaaatggggaagtgtcatcataaggcacagccacattaggggcaccatagtcagatttatggccaatccaggtaggaactcatagctatgggaagcaaggctgtgagaagaaagaggctttatcagacatgggggccaatgaacacctaacgtttgtccagtctggggtgggggttggggagcagaacatgggattttccgtactgaaacaggaaagccaagtaaagcagagcagatcgccttcccggttactaagtgactgacggccccagatcctttaaaacagacccaagccagggaaagcgtgcattcatgcatctcctgccgcagtctctagatcagggagacccaggatgcatcaccctgctggtctccaggacatcattgtcctgatgtagcagtcttggtggaataagaggttaagattttaagaaaattgagagtagggttctttagttgttgattttatatttctttcttcagggtcacagaggtgtaagggggaacaagtctttctctgctcctgagtgctggaattacagacataatgtgtctgtatcacatactgtgtcactataccctaccactgcttataaggcattctttccttcacagcacttccatcttacaaactggaaagaaacttttctgttacacactttttgctaaatagtgaaaagctgtacttgaattatttacataccaagtttggtcagtcacttagttggggacagatggaacagtcaggttgttattcatgacacatcattgatggttcactgccagactagtaacaaggctgtgacattaactgacaaatgtctaccctcagcagaatctctacttatagagtcctttgattgttactgaaatgtcatttggaaagggggccatttgcccacaaactgatagaaccttggttgttatgttgttgtctcaattctagtcacttgatgatgtcaagattcttggtccaagtgatgatcctgctaaattgccttctgagctggtggagtctattggatagctcttgtaactgaacggtgtgttctagctacaccatagcagagagcgggtgcttagttagacgaagctgcctcctttcttctggtctcattctcagcaggttctgggcaccactgtgtcagcttagccatgcaaatgggaacgaagctccttttctctttaaagcttgtgttactctcacccatgctgtgtcatcctactccagtccctgttacagattgcctttgcttgccagagttccagaaggtccctttcaacttggggcacaggccatctgaaatgaactaaagcccagaattcacgtcgttctcaagccttactccctggccttgcctactagctcactcccagaggttgccaggtcagctgacatcctatataaaggctaaattcatgtaggtctcaaagtatttcagactttgccctaccattgagcctgggaacacaggcacatgactattcctagtgagcaaaacccctccaaatgcagacctggaggatctaaggctgagtagttattttcaggttagtagggtgccagggatgggtaggagtggagggaatgactcagactcagcaggatgccttgagagagcctcctgaaaggttgggtgaatgacccatgctgtcagagcttcagtgaggtctaggaccctaagtactaaggcttgatcccactgggccttatgagccacactagagaactgagactttatgctgcaaagatttagggccctttgttatcaaggaaggtaaagagttggagagggtaaaggtgggccagcctggaaggggaaaccacttttccaacggcagccatgcctggtgagttactgtgacacctactggaatccaagcttgttgctgtggtggcccttctctcagactgcagtacatatctacatgccatctgtctgtctgtgccatctgtctgcacgcttgttctctccactcagctttcccctccttttcttcccatccatccaaatacctagttctatccttaaattgctgctgcttttatgcaaagtgctgcaaggttttaaccagtgagaatctcatgcttttatgtactgtctaatcctttctgggagtggattagctaccaggtcttgtagattctccaagcttcattctgatcttgagtttagattcctagggagctggccaggtttccacaggcttgtcctttgtcctaagacagtgtcttagtttgtatacatctgcttgtctttcttcatgtgcacatatgcttcatgaagtcagggatctgtggtttgttcgtgtggggattgtccagtacttgtgcagagccagatacatagtaagtggtcagtaaatacaaggtgaaccaaagaggtactcctgaccattctttaagggcctgtgcaagagctgtggcgttttctagggcaaatggcccttcctccattccccttccttgtatcctaggctccctcctactctctggcctggtttaatgtctttggggtgattcaccagaagctgttaacacgttcctctaagcctccaggctgatccaccagcaccacttagttctgtcgtccagaatgctggacactgagcagatgagttcagggcccagaatgggactttctgggggctgtcttgaggatttcagctgctgagaaggccaaacagacacagtgtcctcgacttctttctcatacctaaggccttgcgatcggaagatgagtgtgatttgggggtgaattttcagctctgtcatgctatatatataccttctcccagtgctgtcagcttgtggacaagtttctaggttttccaatgggagcgtccacagtacaagtcatcagactcacagccagcctcagaaactgcctactaaagagaacttgggtcttaggtcctgagcttctttctctaaaatggacataagactgattgtcgacacaggcttttgttaagtgttgtggtttgacttgtgaaataaaactcttgggaaagcaaggtctagggaggaggtggatttgtttgtatctgtagtccttggtgatgaacctctggtgtactggttccatgctggcagaaggctataggttttcagtctaggctttgcaagcttgccagtgtgcaggagtctgatactgagatcctacatctgctgagttcttctgggcattgatggccttccttacgatcgctcagatactgtcttcatgcttcttttgtttttcttatcgctgacgtggggctttgctctgtggcaatgcgtacacgtatgccgtgcgtctggagtatgttcactcctgagttccttctcctccaccctcctctcagcgcatcccttctcaccgtggtgctctttcctttcctttgtaacctactgaagccagtttgtactgcctgctagaattgacctagcttgtgggttagtctggtgcggtggtcaaagagcattccatagtacctcagtcctccaggatgttccttgagcactggagggagttcatgccacgtggggttttttgttttgttttgttttgttttgttctgtatttggtttcctgttatgctctcataagtccatgcaaatgcattgcttataaaatattgtttttatttactttattgatttgggtttttctttttcttgttttgtttttgttttttcctggttttgttgttttttgatagggtcttgtgtcaaacttgctatatagctgaggatgaccttgaacttctgaccttcccatatccacctcccgagtgccaggactgcaggtgtgcagcatggctgtgttttatgttttatgcagaaactgagccgaaggctttttacatagcaggcagacacactgccaactgagctacagacctggccgttgcttacatttttctatagtagactgggatccaattgcctggttttaatcatggctccaaccatgtggtgtggatccctgggctcctccctcagctccccagaggaccaactccagagttgtggacagagcttgcaatagtaaacatatttgccttttgaaagagaagattcaaatgcatatacagttccatgggaaaacatcattgtcgtggttgttatcttcatttgatctctatttgctgtagttaaagcacaaagtttggtttggtcttctgaaactgttgtaaatagggctcagcttgtacatgaagtctttgtaacttccatgttcatctaaaagtagggaatatgaatgctcctggaaggtgcaagagacattgctatgggcattcttttcatttgatattcataagtagtcatcaatagcaaacatgtttttacttcagtgtcaaatggggaaatggcacaaaatggacttaccatgaaccccaactatgtaagtagaagaaaatccaagtagtagtcagctctgggcagcagagcagctgacaatctcctcttctcttttcttattgtcagaatttccagtctttctaatatgcattttacattttgaaatagaaagtttttaagcttagcatctccaaatactttaatgaccttctctctcaaagctcaggaatagcgatccagccagcttctccgatactcacaggtgaatatattttgagggtctcttcctaaaacattgcccaaagcagagtgctaggccctgcagagatgagaagctgggcaaggtcaggtgttagcatcacagagcgtcagcacttggaatccagtgggcatgtctgtgtgtccacagcagacttgtggaaagtagacatactgagcagtactatctacacggaacatactgaacagtgctgtctacactgaacatactgagcagtactgtctacacggaacatactgaacagtgtctacactgtactaagaagcttctgagctcagctgtgcggctcagtggcagggtgtgtgaaggatgtgtgtaacatcctgagtgtgactgaggaccagagagaagtgaggggagaaggaataaaagacatgggaggcaacatccaaccgttgtgaagatgtcagctcagctctccaaacctagctaggatttagggcagtgccaatgggaatcctagcagcatttttgtgtgtaaattggagctgttttaaaatatttgtggaaatgagaagcttaaaaaaacgaccaatatagtattgacagaatggaagccaagaagttggagggctacagtgccacataacacaatttatcatgaagctgcagtgctagaggacataggcttgacactggatagacaaattgatcaggagaattagaccaactgcagagactcacatatgtggtcaccaactaatgagaaaagtggccctggagtgagcagagaaatgaggaccttgtaagtggcagtgggccagccaggttatacattagtgtgggctggcacctgatactaccaagaaaacaggaccctttataacttaacgtaagcaaggatctctatagatcattatgacaagagctgtctggaggtcggcaatgtggctcagtgggttaggtgcttgctgcctagcctcatgacctgtgtttgaaccttgggactcacataatggaaagagaatcaactccttaaagttgtcctctgagttctacacatgttatggcatatgtgcacccatgcgcatgcatataaatacaaacaaataaataagtaaacaaacaaaataatgtttcagtatgctctctgaaggaaagattggtaagactgacactaataaaatgtagagggctggtgaggtagctcagtgggtacaggtacttgctgtgcaggccttacgacctgaattcaatccctaaacccagtgtggaaagagagaactgctcttgcaagttgtcctctgacttctacatgtgttttatgatatatgtatgcttaccccccacccccataatacacacacactaataaaataattttaaaggctattataaagacaaggaaaagagaggccagtatggagataaagtgtatccctgtatgaatgagcatttaccacataagtatggttgtcaaggaccccagtgctgaaaccactggaaatggcaaatctttccctgggtcaagcttaggagaatggcaaggctggagttcagatgttgacagcgtgtgcagaaagtatacatttactctgctcccagataactgtagcctgagactgctgccctgcagagatcctctaccaagattagctgatctgcttcctcattcagcgctttgatgcctagttgctggtgtggctccagcatgccctggcaccctaatcctggatttgctgtgcatatatctgttgtttcttcattcctggttgctctagtaaattagtctcaaatctgtggtcacagcaccacagttggggaaaacaagctagaatatttattatccagtaaaggatttatatagagaatagataaagtaaaggatatatatgtatatgataaataaagagttctactaataagtaaaagtcacgaagaataataaagtgggcaaaagtcttgtaattggccctgccctaaagaggaaatgcaaattttccatcaccgtgtgagagaaggcaccatttcaccttggtcttcctgaggtaaaaccccccacaggacaccatgaaagcctacagaactacaccaccaaaaaaggctgaggacaagtattggagaggctttgagctcatgagggctcttaagcgtgcctcccagccacggggctggcaaggactgggtgtagctaagccctttgtgctaccttggcctgtgcagtgcttacactgggtacatcccgtggttaggtgagtctgagagtcatgtgaaaccttcccttggtgccaggctcctgggagctcttagcatcttctgactagcctgtccttcatctctgaaaaagccttctaataggatgttcttctgtttctttgtgctttctttggagtttacaaccctttcctatcctccctccaagtccttccatatcatcctccccttcaaatccatggcctcttttcactaattgttactgcatgcataaatgtagatgcatgtgtattactaaatataatgtcttctgtcagtgtcatgttacttgtgtgtatgttttcagggctgtttgacagtagacaacaacagtagacagagccaaagtgtgctcttctctggagggagactacctctcctgcttctggctctccttagttgcctgtagttctttgtgcaggattgaagcctcatgggctttgctccgtccgattcattggtgccgtccttgttcagaacatgttcgggcagtcatgttggtgagaccttatgggtgtagcttctgatgttgtcaggagacacagtttcacagcaaacaccctggtcctcttggctcttatattcttcccaccccatcttctgcaatgttcactgagccttaggtgtaggagtgttttgttgatgtgtctgtcaggactgggctttacaattctgcattttttgattggttgtgactttctgtagtctcctctgttgcaaagagacatttccttgatgggggctgtaaaccacacttatgtgtgggcataaggacaaatgtttatagattgttgttagggattatgctggtttaataaattagtgcctgtagattctccaatagccatgacttcactagcactgactagttagctaggtttccagcaccaggcatggtctccctcttgttgaacagcttttgagtccaaggtatgtgtgcttctggttatcatggcatgctggttgttgatatggtccatagttgtcaaagctggtagggctgttggttgcttccctccctcctttgccttctgataccatgaaaactagttctcaaagagagggtgtccagctggggctttggaccctgtttctgaagaacatggtgtcttcagcaataggaacttaccttccactcttggggataaccaagggcaacagcaataggccgtgtgttttgggagtctcttagacagtcctggccaacaactcaaaagaaggcttcacatatttggaattggagtttttaactaggtagtcattggctcactgcgggtgcaccaccagcccagatgagaaaagttcccaaataagacttttggaagcaattacataatgaaggaagctatcctaacaactagcactttagtggcccctccccttctctcctcctgtctcattatataaccctggctggcctggaactcacctacttctgcctcctgaatgttgggatttcttttaaatttttgtttgtctgtttgtttgcttgtttttttgagacagtttctctgtgtagccctggctatcctggaactctgtagcccaggctggccttgaacacagaaatcctcctgcctctgcctcccaagtgctgggattaaaggcttgcaccaccacttcccggctaaatttttgagagaaggaatcactctgtagtccatttaggttagccttgaactcagtcaaagtagtcctcctgcctcagcctccctagtgctgggcttccaggtgtgcatactctacccagcttgacttatctgctcttcccaatgccaccaggaggacgggtgcttccattttacagaggatgtcatcaaagtacagaaagatgaagtagcctgctgcctcgggattaccaggttgttagtagtgatggagacatccaggcctcagtgtgccagtgcaggcatctgtaatacctactgcctctccagaagggacccacaagtttcacttactgctccaagttccttggacctttcccacctcagtttttccctcaaggtccttttttgctgactgtctgggaccagcctgatatcaccttctaaagtctggaattgaacaacctaataaggatgtttataacaacccccatcatgatgaccacagtagaccagcagcagctaaaactgcttgggtatggtgcatgtgtgccaggctccacacttagatgtccagaacaccatatttaatcaaacaaccctgtgaaaagtcctccgtggttactactgtggtacttctgtgttcagacagagagacagagagctgagtgaaatgcctgtcacagaacacagttaggaggtaccagggacagggtcaaccccaaaactgttggattccaaggcctgatgagctcttttgttggtggtggtttggtttggtttttggttggttggtttgcttgcttgcttgtttgtttgtttgttaagacaggatttttctgtgtagccctggctatcctggaacttactttgtagaccaggctattctagaactcacagagatccacctgcctctgcttcccaaagctgggattaaaggcatgtgccaccactgcctgccctgacaagctcttatcctagctctctgctgttttttgaacccttacttgtatagtatactcagtgtgtattagtagaggctgtcctctgcttcactcagcgtttatatagcacttgttatgtaccagatattctagagtatattggtgtcaccatgatcattaagatgactttcctgatatggaggttccagtctagtcagagagacagaccatggagaacacagtgctctgtgaagtacttgctacttcccaagaggggacagccaggtcctcatgggagttggcggattgaagtgaaaaagccttctccaaagaaagcttcatggagagaggcagagtcttaaatatgagcgagcagcagttgctgactgataaggcagcaagggcagtctattcagacagcccactcagttgaggtcagaccctcagagtagatgagctcactcatgttgctgtttcccagtgagccaggagtgtgatgtgtgatgttagcacgtgtatgctatcctgcacatgtgtcatagctccagagtgggaagactgcttctccctgacctgcactgtcagcattaccttgtccctgggagaatgtccattgtcctgtggactgtgtgaaaaggtcattgatggccacattgggagtggtgcagcagctgtcagattttaagagagagggctggagataatagctgtgttgtagagcataggtgtagtgtgtaagaggccctgggtttgatcctcaataatgcatgcatatgcacatgcacacaccattttgatccattcacccaatagcctgattcagtggggttgcatgggagctgcatggggagcaacgtaaacaggcaaaggaggtgcaggaggcctgtgaaccacagtttaggaaagtgtcccttgagtttcttgtaagggtaggcactagaatcacagtggacacatagctttgtaatgaggtccctacagtttattccagggtggttcaggtgctgctgagtcacttccttgtacaggaaagtgggacttatgtccttacatgcagcattgtgggaagacctaagtaccaaggttggatgagttttctttttagagggctttaccttgtggcatgctaaaaattgtacttcaggctggacatgactgccaagatgagcagattacaattctaggtttacctgggctacagagccagttcaaagccagttgggtcaaattcctgagatcctgtctcaaaataaaatataataataaaaaatgggaggtgactattggatggagcttagagactcttatggaagagttggaggaaggactgaagaccccaaaggggataggagcgccaccagaagaccaacagagtcaactaacctggacccctgggggagttctcagagactgaaccaccaaccaaaggtcattcatgggctggacttagaccccctgcacatatgtagcagataagcagcttggtcttcatgtgggtccagacaactagagcaagagctattcctagagttgttgcctgtctatggaatctgattcctaacttgcctgtcttgtctggcctcagtgggagaagcaccacctagcccttcagagacttgatgtgccagggttgggggatactcaaagggggcctccactctcagaggggaagggggatgggaggagggacagatcaggatgtaaagtgaataaaaaattaaataaaatagagtcaagctaccctttattaagcacatatgcattgttataaaagaggcttttacagtaaaataaaaatatcttcttgtaaaaatgacgataaactaatctataatgttattttattctttgtaattcatgacttaccaaatagtaaactatgtcttgcaacattgaaaaaataaagaaaaaggaaaaaggaaaaagaaaactggaaggtgaggttgtagctttgtggcagagccttctctgtcatgtcagacagcacagtgaggacagcgtagaacactaaacatttgggctgggagcagctaagtctaattattccacctccaaggtctgcctctctttgttccctgcttttcgggactgtgggaaacagctctcccagcctctgatagatgtcttgagccacctccttttgatcccaattaaacctgtggccctgacaggtgaagtctcatggaccttagcctccccagccatttcactctagatttcgcagatgagattgttcttgggcaggagtcactccttcggtcctatacccagtcctggtttccatggtgtgctgcactagagggaactgtaagcattcggaaagcagtgtttagtgtcctaggctctggctaagggatatctgaccctgtcctttgactccatcaccagcttttttttcaggtacctggcactgactactgtttcttggcatccatcactgatgactgagataagccacacttattcttcctttagtttcactgaatcggaatccccatgtgtgctttgggagcctctgattttgccagctctgtaatttgtttgcatcctgaagttttttgggtgctggtttcaagggcttggtatgctcttgcctcaatttgggcagatgtgtccctggcatgtaatgcctcagagctccttctgccatattttgggggtgggagtgacctctctttctatctgaatgggaaactgggctaacataaacttaaccactgctgtgttgtgagtgttgccagtggcccttgggcctggctttcacatcagtttgagtaagctcttatgtctccctttttttctaggtacctgtaccatgttttaacaaaaaacaccactgtcacagaacaaaatcggaacctgctcgtggagaccatccgttccatcactgagatcctgatttggggcgatcaaaatgacagctctgtgtttgagtatgacttgcagtgcttttgtttcctggttcttccacttcctttgggtgtctttccaagtgtacaccatgagtcattcctgatgacgtcaggaactgatactaattccatcttgcccgaatatctgtatcaaacgtccttgagagaacgttgaggtgcaagccaaaaagggaagagctatggaaatgagtttctctagaaaagctgaagatattgtggataacattccaagttgagccctatcatctgctccagggcaagaagagtgtcctggatattacggtcctgccctgagggagttgctgaaggccagcatttannnnnnnnnnnnnnnnnnnnnnnnnnnnnnnnnnnnnnnnnnnnnnnnnnnnnnnnnnnnnnnnnnnnnnnnnnnnnnnnnnnnnnnnnnnnnnnnnnnnnnnnnnnnnnnnnnnnnnnnnnnnnnnnnnnnnnnnnnnnatgtggtacctatgcgtgttggaacatatgcaggcatatatttaggtgtatatgcatgtgtgcacacatgtgcatgtttgtggagatcagaggttgatgtcagctgtcttcctccaccattctccactttatttactagaattaaggtctcttgctgaacccagggcttattagttcagtctggaccagcggttctcaacccttgtcacagccttttcacagggattgtctaagaccagcagaaaacacagctgtttacattgtggttcataacaatagcaagttacaaagttatgaagtagccacaaaaatgattatgtgattgggagtcaccacaacatgaggaacctgtattaaaggattgtagtgttaggaaggttgagaaccagtgatctaaactaactggccattttgtcctcaggatctctgcccctgcttcctgagagcttgggttataggcaggctgccatacccacccagcttttctatggattctagggatctgagctcatgcttctgaggctggcactttccccactgagccacctccctagcctctaatacaaacgtatttactgagggccagcaagagtcctgagctttgagagcacaatctaccaaacttgcccctcggcccacatggaagctctattggtgtccccacgtgtagctggaagatggtgaaggagcctctcattcctagagtctaccaaccggaaaaataaaaattcttgccattcaagcatgaagttgaatccccaaaatctatataaaggctatgtatggtaacacacatttgtaatccttgtgcttgtatggtgagatgagaggcaggaacaggaaaatccctgaaaagtggaagacgggtcaggtagcttgtacatgcaacaacaatgatacctgtctcaaacaaggtagaaggtgagcacaaacacccagagcctcctctgacttccatgcactcagcatggtgtatgaatgtcccaacacagacagacacactggacacacagagagacaaacatctacttgagagcgtcacactagattactaagtcaccccagcagcaatatccaggcacagatgtttgacagcttcctccattggccacccagtggtattgagtgtgttcatgattcaggagagctgctgctttttataacctgaagcaggggcagacaaaaataggtcaggggcctgaaatgctctggggtcagttggagcagtgtgtggaggcaggcaagctcctggagtcagagcaagaaaagaactgacaggttttagggtcatattttatcattcacttattttattatttactttatggattcaaacagaattatgtggcattgagtgtcaggcaattggtccctgtggagctgacaggtgaggagagaggaccacccagaacggagtcaaccagcagacttgtgtgactgcaggggcttttccttttctgtctgtctttctatctaacattccttccttcctccctccccctctctctctttcccccctctctccttccccctttctgtctatttgtcttccccctctctccttccttcctccctccctcccttcctttctctccttccccttccccttttctgtctgtctgtctgtctctcccttccttccttccttccttccttccttccttccttccttccttccttccttccttccttccttccttccttccttccttctcagaaacagtttcctatattccaggctagctacattgaattcatagtgtagctaagaggctgactttgaacttctggctttcctgcctctgcccaagtgctgagattacagatgcatgcttccaacacttgccttgtgttctgctgggcaagcactctatcaactgagctatatcccagcctttgattattccaaactgatcctgttcaaatatactaaacaaatatgtagaaacaacatcttcttaaaggaaggtcctatttttaacacacacacacacacacacacacacacacacacacacacactcacacacacacagaactgaggtgtgtacctggccaatgctcctggctgtgtgtcattccagcacaagaaagcagaagcagacctggggactatagggtgcctctaccacatcggtgtcttcaccttctttcaagttctttgtccagagatctggaagctgcacacttgacaacagaagtgaaaaacctctgctgtcattcagcatcctcaggccttgcagggaagccacttcttgtgttttcctaaccttgaatatgggagcgcaagggaaataggttttgtggggaagctaaggattccggttgtgtatgtcctggggaacgatgcttgtggtgcacagactgctgtgtggtcacttagcaggaagagagcatccctattctgtcagaatctagttcaccatttcatgtaagtagcaccaccctggtctgcttagacaggaaaaggaagagtcagagtgcatgtgttgttctcccttgcagatgggatcaagggcactgagactatccaggcagccctaacagtctagtcttgccactggtgatcttcatagggcgagcctacacatagcagccgtgagcgtatcacccactgaccctttcttgttctttccccagcttcttcctggagaagaatatgtttgttttcttcttgaacattctgcggcagaaatcaggccgttatgtgtgtgtgcagctgctacagaccttgaacattctctttgagaacatcagccacgagacatcgctctgtaaggacactccttgccgtttgcctgtgtactgctcagtgtcggatggttccatgtgtctgcgtcccactcattttagtctgcccaggctttatcccaataggcttagtggcgtgtgtttgcccactattctggaagacggatatccactttgaagctgaggtcagggctggtttctggtggggatttctttttagtttatagacagctgctgtctgagtctgttttcttttactgtaacaaattcactgagactaagtaattaaaaatatcttttatttcttatgtgcatgggtgttttgcctgcacatatatctataatccatgtgagtgtctaatgcctgctgagggtattggataccctggaactagaattaaagatgattatgagccatcatgtgggttctgggaatccaacccaggtcctctcaaagagcagctggtgctcttaaccaccaagtcatctcttaagctctgagaaactaggtcatttaaagaaatgagctttattttggcttaagatttagaaggccaagaagttcaaaattaggtatccatgccttgtgagaaccttctgctgcttcaactcacagtcaaaaaggctgtgtaaaagaaaccatatatttgctcagtaagcgcatggtaacctgatttcttttaatctgtgagctttacagagcaggtaatccccattgcaatgcttcaagtgtttctttaaaatttgtgttgcatttacctctttgcgtgcttctctgcatgtgagtgtgtgcacacggccacactgcagagtgcacgtggcagtggaagagatgtgagtgtgtgcacacggccacactgcagagtgcacgtggcagtggaagagatgtgagtgtgtgcacacggccacactgcagagtgcacgtggcagtggaagagatgtgagtgtgtgcgcacggccacactgcagagtgcacgtgacagtggaagagatgtgagtgtgtgcgcacggccacactgcagagtgcacgtgacagtggaagagatgtgagtgtgtgcacacggccacactgcagagtgcacgtgacagtggaagagaggtaaccgttctccttttgtcggtggagttcggcattggtggcaagagcctttactttctgagctctcttgtcagcttgcaggaacttgctcttaaggtaactaactcgtcaagggccaggagaggagaaattcacagtgagaaagatattaacccactcatgacagcttcactccatcacctaaataccactcataagccttacttcctaacgtggcctcatttcaggaatagaggttaggactcatgaaacctggggccacattagaccttagctaccttctcacagtacctggccccgcctgtgagagaatgaagtcagagagctcaacctctgggtctctctgactccatggggcactaattctgtcaggggtggagcctgaccctgcaaactcatttaatcgtaattaccctgtcatcacatgtagtcacactggaaacgacatgtgcagcttttgactatgttgagggtagttcagtgtggtagggttccatgaaggactcctgctgattgacttgccatcccctcagcatggttcaatttcaaagatctaatgactgaggagtacataggccagcacttctaagagcaatggagaaggcagagaggtcttaggggtgcctctgcttcagttttgttgcccagcaagcaagaatttaactcagttcaaccctcagccccatttattcttctgagaggcaggggctacggaggctcttgttataactccaagaaagtttgagtcatggacccaaagtaaccagtacagcacattcagagtagaggagagattttagcacaggagaatacactcagtggtcctcagtgtggtgctggcattttctggagctgctcttagttgtcatagtccatccgagtagagggaggctgcaatccccagggcagaccttcagcagagcattaccagacccttatctatgctgggactgagccagcctaatttcattctgtgctagttacttactccaaatgcagcacagtgcaggtcctgctcttgaaagcaagagaaaaaacggtggagcgcccagagcaaaggcaggtactgacttcttggggcaaatcaagttgctgggtggtggtgaccttagcagtggccactaggtggtgctgtagccacagagccctcctcctcctccccctgaccacagatggtgctaattcacatctccctgtgtggtttcccttgttatcagcttctgtttcgctggatctggaataagtgtggtttctgagctcagaggggaagatccagctctgaggtgcaggctcaggaatgttctgaggccattgggacaattccaaagtcttgacctttaatatggggtctttggagttttatcttggtgacccttttgaaatccatttagggctaggattaacagtacgtcctttgaaagttttagcttcttggtgaagtaccttgaagatctgatgtaaatcctttgaggtggcctctgctgtgcagctgacatgtacatcacctttcagaacttcctgtctgaggatttcagacctctaggtcggagccattagctgtcatcacgggtcaccaatctgtaatggagaacttagctgcctcacagggctcttgtgacctttattccagtctccccacttctccagacatggctcctgatgaccctctctgccctctgcattggtgctatttcagattcgatacaaaagtgatccgacatgtgcatggctctaaaaggaagtgggagcagtgtgggagctgcctgcaaagcccagcagacacacacctttggctttcaggacagtttattaaaagtagcttttgaggcagtgttctctttgtagtgtagtttggcctcaaactctcagtcttcctgcctcagcttccaaagtgctgggattaaaggcatgggccacaacacccagctctgcttcagtctctgagtgccaccatcacagtatatgtatgccatatgccctgctgcttttatttttactttttagttttagtgggggagtcattgtaaaacagcataacatagtcacagaagtgcagtcaggtgcctgtagcctcccaccctgcacccagccatgcaggccgtcctactcactctgctgttcctgcatgtgactcgccctgatctatattgttattaaatgaacctgactgtgggcatctaggtgctttccaggttctcactattacgctattacagggaggcattgcacagatgctactgttgcctctttgtttggtgacctaagtaacagaggcccaagagactgagattacttactgactcccaggtttattataacagaataccacagaatgtcagccacagtgagggggtagtagaaaaatcccagccacacagtgggcccctttactgatccctaaccccccacagaaccttgtagaggacttaaaaaagcccctgtgaggagcagatgaaccttgtggctgtctcaggtgtagaatgtagccagactttcttcacacaccttaagctgctagcttttgtgccatttgtggcccagaagcaactggcctataaatacagaacttactgagatgtcctaatttcctcctcctgttcccattgccagatcacaagtgttccagttgtcagaagcacctaagtattatgttacatggtaaatcacaggtggataagtaagttggggacagttttaacagcaaagagggggaggtagtgtggctatgacaacattcagacgcagtgatgagagagaccagacactgacagcctcatcctgtttctatgacaacactcagatgcagtgatgagtgcgaggccagacactgataccctcatcctgtctggctcctctgtgtaaggttcacaagcaggtgcacaagtctatagagatggggttggagtggttccctgccttgagagaagatgctgacagggcaggggtatgaacaagcttccgaaggaactgcagatacaccgggccttaactgagtggggcctgcacagcatacatctgtatctatgtcccataagcagacacctgaggctcacatgcttgagtgttaaatgtgtgtgtgcaggagcttgaggttctatacagtgccatttccacatatagcaagcttacctggagcacttgtgaccatgacttacttaacaatgtattcaagatttttagggccccacccactctcctggcctctcttggagctggccccaagagctgcctcaggtatcagagacacgagggcagtctggctgcattatctttcaccatgatgatctctagggttggtttagctgatcttgctggctaggttcgttcactatcttgggtgtattccttcataaggtatatgctctgttgacattgccaacctccccgacagaggtcagaggtgtgagtagtgctgttccccttagaaccaggttagtgttgggtagttaggacctgaggtggttaacctgatgctagacacatggtggggataaagggactcttatgagattgtcagtagatagagattagagacacatgcagccctttctggcattctggcatggtaatgtcttctgatggccatgtgggctagcagtgaacagaaaacatgcttgagtctgtctctttgggttcacaaaggaggccacaggcttctccctggaagggctggtgggcctgcgtagtgtgtggtttcttagacaggtaaaggttaagccgctctttgttgctcactggttgagttgtgcttgttactcggcggcctgtgctggcatttcctccagcccgagctcaccggttgcactttgtgttctctctcctagattatttgctgtctaataactatgtaaactcgatcattgtccataaatttgacttttccgacgaggagatcatggcgtattacatatcgttcctgaaaacgctttcattaaagctcaacaaccacactgtccatttcttttacaatgaggtgagtggcgcccagcaagtgtatgtgtcaagctagtccaagcgtggaggcctttgctctacaaagcactttcctaagcacagactttggcatacttaaataaaattttttgttttaaaatatgtggtgtgtgtgtgtgtgtgtgtgtgtgtgtgcgtgtgcgtgcacaggggcatgtgttcaagtgtgtacatgtgtgttctgggtttgtggggccaagcaagggctataaaattcctactttgtccctctctggtttgttcttttggatctcttcctggaccaggagcttgtttgcattttgcaggtaggctggcagccagcaaacctcgtttgcctccatggtggggttagaggcatgccaggccaggccaggcttgttaggtgagtgctgggactggcattctggtcctcagaactggttaggaggcgttttcaaccgctgaatcccacaaacttttttcttttttcttcttttccttttgatttttgagacagggtttctctgtgtaacctctgctgtctaggcactcatgctgtagaccaggctggcctcaaactcatggagaaccacctgcccctgttcccgagtgctgggactaaaggtgtgcaccaccacacctgacacaaacttttttctttaattgaacaaattttcttgctattttaatgtaaacttcaggttaacttggcagggaggaaaatgtccagaggttaccttgttggaaacagcagaaactccatttaggtacagcttttctgctccttgcagtgtgacaagagaacttccaggcctctctgagccccctcctttgagaaatgaggtgaaactatatacctggctctgggtttcagggactcactagatgagattccatcttcagagttgtgagaagtgataaactggcacagctgtccttgaggggtcaggtccctcacagtcctgggagagctactcttatagcgccaaggagcttgagattaaggtcagtttagctcacatgcttaaagtacaaatggcagctgcgctctgcctcactgtaggaagggcccagggttttccagcttcctgctcagtaactgcagctggcatctgctcaaggcttggttccatgtggccgtgtgattgccgatgctccagatatcactcaatcacatgctgttgtcagaatttctgataccatttcctctctcgtatcccttctgagagaactttctcagaaaagtctgagaattcgccctcagacttctccccatgtcccactgattagagttgcaccagtctcttcagtgtgttggacttcaggcttggctgactagagctattttactcagtgccccaagaggctgatgtcctctggaggctggaatgtggctggagggtctgcttcactgtcgtggtggttagctgaatctggttgtgcgtgggagaccacagctcctgttcaggggcctcttcccagggctgaccagcatccttccagccaacttccctagagtgagtcacccagcagaccacggtaagcagtgatgccatccatgccagcctcgtgccactcacactcactcactcacatacacttactcctagcatactctttggtcacacaggcatgatctgcctctgtgggcggatccagcatgagtgtgacacaggtggtgaacatgtttggggactgccttggaagctagatgtcatacagccagctgcatgtcatttgtgtggcagatatcacctgagtggttgtcccacatgctcaaagcctgtttttgaagtcagaccacaatcccaaactttctgagtttgggcaaaaaccatcaactcttgttgtatggcaacagtgaaccttgattttcatgattcattagtctctcagaagaaaatgctagccaagggccaaaaacatgaatgcacttgagaaaataacatgatagactcctgtccctgccacatagtaggtgcttgataaacatgtccagggaacagctttcacccaaaggctctcccatgtggaagaaaacccagaccagagtgagggacagagtattttttgctcaggtgccttctgagtcgtagtgggagggcagaagtcatgggtctggaagagctggacatcccagaagccttgaggattttttggtttttgtctgtgtttgtctgagccagattagtagtttccactttttagattcatacttgattgctggtcctcaaaatggaattgcccttataattgccctgttgttattttgtgtatcctgctccattccaggaagggctagcttagaggatctctgtctaccatcccctctcctgagccactcacacagactgggtccctgaacgatataggaacattggccacaggaggacagcaaagtacactgccagggcatttttgctccatcctctcaggctaaggcagtgtgagtcttgttctgaaccatttaattgtttctctttgtccccttttaacagcagaagactcctaagaccctctgcctccctgataatgctacacttttagtatttccaaatggagaatggtataacagccaagacatgcttgaacctactccaacttggtctttaatcaaccaggtctgacgtaaataactagcactattctccatgcactgtagatgccaaggactaggcagagcactggaccagaaatgacctcatttcgtcccagaggccagagagtgtgtgctagtaccccagttttataggtgaagaagtggactcagaaatacctcctcatacagctgaacatgtaggccaggtcagacattctgtgtacattttctcttccctggcttcctcacctcccatcatggtgacatctggtgtgttttactttggttttgttctgttttatcacagtctgacacatttcagaaagctttgggagcaggtctgtctttggatttgtaacttttggaaccattttttgttttagcacaccaatgactttgccctgtacacagaagccatcaagttcttcaatcatcccgaaagcatggttcgaattgccgtgagaaccatcactttgaatgtctacaaaggtaagtttcctcgtgcacttgggcttcaggtcgtaagccaagtgctggctcccaagctcacaaacacagttccaagttactggagaccttgcctagtatgagcagtggctgcttgtctgacagagatttgcaggcatatcactgttccttgtggaaatctttgagctgtatactctagcattgttccctgctgctgccccaccttagtctatcccaagaagtctttgaggggttggagtggccataagctaattagataaagcaaaactgtcttgaaaattttagctttaaatttttgtgttttggcttataaaatacgctgttacagttatttgttttatagtttatctttaaatatgcatgagagcatttcacatcacaagcagcaggaggcagtattgtattcccagccagccaccaaggccagtattaacaacagtccttcctttctctcagatgtatgtaatgctccatcctgtgtccagtggagagtctttccacaaggcctgccggtgctggcacacaggctgcctgcctgcctgcaaggttttggagctggaactggccctcttaagacaattcctaaaggctaattaatttccttgtggaaaccacagtgaagctgggcctctagtttcttggccattcaagggctttgactttcatgagtcaaggtggtattacttgagatgcaataccagttgagggccagggaaggtcaccttaaatttaatttaagagctttttctcagagcctaatttggtccagccagagattgcaaaatgagagcctgtagacacaaaccatccctcagacacatttcagttggctcagatggaaaaaaaaatatacagaacatccaggaataccttgtctctaaaaagaaagtgtgcgtgtgtgtttgctttaaaatataaaaatttggagtttttacactgtgcatttctgacttgaagatgtgcatttgggtattcagggcccacactcccatggggaattaagtggtcaaaggctgagaagcaatcgttgctagggctccaaccccctaatttgctctcccagccttcagacttggttcgctgtgcagccattgacctggcagacttctgagtttgcagccttggccatgcatagttggttccactgtcctatgctctgttttctcttgctctcttctaactgtgtcttttggtttagatgcctcctgactaggctttgtccttctgggccgctgtctcaccttcccagttcctaaccctgttaactgttgtctgtttttgcctttcctccaatgccgattcctgttccttattccagtgtcatgtaagttattaacctctggttttcctctttctgagcttgccttacaagtaaatgcaggagagttggtttgagagtgctgcgttctcagtttagtcaggccttgcccttgctgatgtacaggctctccagtgcactgagtgtccctccctcagttataacagtaatgactaagtgtgttagttgagagaagagcaccagcacagctttgtgtgataactaagataaatatttccaagtattttcaggaaagacagagtctcagatggtagcaaggtttttcatggtgatttttggtttgtttgggtgttttgttttgttaaactgtccttgaattattttggtggcttactatctcttcttttgtgcgtcctcttagtggataaccaggccatgctgcactacatcagagacaaaaccgctgtcccgtacttctccaatttggtctggttcattgggagccatgtgatcgaacttgacaactgtgtgcagacagatgaggagtaagtagtgttccagccgtctcattggagaacagggtgctgaggatgtgtgtttccaccaagcaaaagtagagaggagagcagcacttgtgtctacgcaggcagtcaggactccaggctgcagaaggctctgcttccctgtttggggtggtgggaagttggaattttcccatgtgcctccgtatgggcactggagcaacactgcctctagctggggctgtgaggctgctgatcagaaaatgagggtgtgtgaatcaccaaaatgtagtgcatgggtgacttgttaaagcccttgcctcacaaacctaaggacctgagttctatccctggaaacgacatggaagtgcagggtccagtgattgaaaaggcaagtctctggagcttttcggccagctagtttacttggtaagttccagaccagtgagatactctgtctttcacaaaagacagcacacacaagcaccacacacaaacacatgcacatatactgtaccctctttccacacagaacacaaaatggccaaaatgggatctgtctatgcagtggagtagtacttagccatgactggtctgaagtgctgacacatgctctgataaacctctaaaacatggcctgagtgaggggcagacacaagcacctcacagcccgggatctcactgaaatgcccagaagggacagtctaaagacagagtagatgagaggtttcctagggcggggatacaggatgagggggtgtttctgggagcaggtcagaaagctgctgctgctgagtacagggcttttgacagacaagattgaaaatgttacaaagcagatgtgatgaacatacatggggcctcagagagcacttgctgaggccctaagttcaactgctagtactccaagaacaaaaatgtaagaaacccattacattatgtacatgaaatgaatgagttttatttatcagtgaatcgtatctcaagaaaacctttaaaacacgatttaagatggtggtggtgaccatgtcctcagagtgaggacttgaagttccacagtggctttttctgtcttgatactgtttgaccttctgaactgggcactttgctttgcagaatgttgagcagcctgcatggcctgcctcttgtattccatggctaataacacctttccaagtcaggacaactgaaaagcctcttgacattactttaccaccaactgagaacaaggctccaaggacaggctttgcctagccttgtaaaaagtatactgagatgggatcaggatactcgggggatccaaaaggaagtctcctggacaaggggagccaggcagcactgggaagaaatgaggctagggaaatggtgggattgggctgactggaccttctggaagataagggccatgtggatcacagctatcatggaaggaagtgaacccagcgtctcctgtggagctctgcagtgaccagttatgagagtgtcacctagttacccagtaagtactgtggggcagagttgtggcgaggagagtccaatgaacagcacctacaaaggctcagctgcagagtggggagcagtacaggttccacagagggcagagggactctcttcacagagggccagtgattaagccttcctcagctgggcctgctagctcaggcctggcgtcccagatcctcaggatgtgtcagcaagaagatcaaaagcccaagccctgtcttggctacagagtgggttccaggccaacagcctgggcaacttagtaagactgtctcaaaataaagtacaaagaaggctaggggaggagctctgttgtagaatatgtgccaaagccacatgaggctctaggcttagtccccagtttcacacacacattttttttttctctggattggggtagctgggtcggttatgacagatgctgttaaactcaccagagcacttcagtaaagtttttctgaaggaaacattaaaaagtgaggtatattaaaagcctattaaacttatttttatggtatcttaaaggagtagtatggaacattgtgtgtgtgtgtgtgtttctgggtctctggtaaggtgggatcatagattcttattatatttgggctttgcaaagcagatttctgattggtatcttgtaaaggtgtggaataaatgcaccaaattaggggaaagcaaatctgaacctctttcctgcctgatacatgttacttctagaaggatcttaaacacattttagattgtctagagggagagagtaaaacatgaaaatccagctgtcagatggtaggtcccaaatgtcaaaagtgggtgttcacaagtggtggccccattagaacactctctttgctctggcttttccaagtctcatgccttctgaaacatccatctataacttgggtagtagtaatcctgatgcaggtacagtgccctgctcccagctgattgctctttgcccactttctgcttttgaggtcgtgaactctgtttctggcttctttgactgtaccctgcaaacaggcagcatggttgttgcttgctgcagggtcacagatgcctccagcgagggcttgaggaagagtgtgtcttggttctgtgtcccgccatgtgggagccagagctttggagtaaggccttcttcgtgattccttacctctggagtacttggctcgctgggatttgtggctctgttagcactggtcataagggagctgaggaatcttaccatgttggccagtgactagactactattgtgcaatggcttcccacaatggcttcactgtttttctttgcttagcttaccctgacttgtttggagttgcagttgtagggtgcctgggccaaggccatcagggggaagagccccaagagttctaaaatgtttttcagtgtcctgtatattattcttttgtctgcccctgtcaggggcagtgtggataatcaagagactgtctacactagcttccctagtgtagattatctgcactagcttacactagcttggaggctggagtgaatgtgtctccacatgtgtcttgtgtttatgctgaaggccccaagccttggcctctggactgagaggaacatttctattgcaggcaccggaatcgggggaaactgagtgacctggtggctgagcacttggaccacctgcactatctcaacgacatcctgatcatcaactgcgagttcctcaatgacgtactcaccgaccacctgctcaacaggcttttcctgccgctctacgtgtactccctggagaaccccgacaaggtgagtctgcatcgagaccacggcctgcctcttgcctgtgtcttctgagagacagcctctgggagtgagggtggaagtagcagagcctcacaccccagggaaaggcctttcaaagctcactggccttctgttcttgatacgaacatgaccaagaaatgtaacatagctggtgtcagggaagtgtgatcccctcgaactcagcctctgtgctcctgtgcacccttctatgggtgtgctgtcccatagctttctctggtgctcactcaagctaattctcagagaattgccagtcagcatcagaactttcatatgaaatgcataggaagtgctggagcgtgctcagggaaaggtctcctgattacatacaagttgtcaccctgattcctccatggggtaggggatagtgacttcctgggaggccatctcatttcagggagttcacctagttgagcaggcttgggttaggacaggccatctatatgagtaacctgtttctaagtagtaccatgagtggctggttctggggtctctaggagaaaagctgcttcaggaagagaggcctcagttgtcccttcagagttaaggttagaggaagacagggcaagggaacacagatgtatccagcagaagctgtctccctgcaaggcacctcgttagatgcccccaaggcatggtgtctgtttggacctagaacataggcattcttccaactaataagtaaataaagcaaaggaagtcacagctccagctcacactggagcagctctggagagcatcactgagacctaggattggagtcatttctgcctttgtccttggacaaggcacaaaaacgcagggcctaaagatccctccctgacaggactgctctaacatgggcagtcgtgaagctgagtgcaaatcacagtttgttttgtgtttttgttttgttttgtttttgaggccagagggccccaagtcctaccttccccatgtaatgaagacctgtgtgcccagctggggaatgagcacggctgtaaccttggaagtgagcacacccattggatcagctgccaagacaggactgtgctgcagggttcttaggggaaggctggtctcagagcccagtggggaaggggatgcacttcctgtctgaactgaggacttgtggtcttctgtgttctgtttgccttttgtaaccagagccacctgtttcctctgtccttcactagggaggagaacggccaaaaatcagcctgcctgtgtccctctatcttctctcccaggtatgtttgttatgcatcccgtgtctcctacacaaatgtggtcctgtcccgtgtccagatgcttattacgtagttctgtggatcccgtcttgaaataaagtccaacacaagggaaactgctgctttccatacaccaagtagagtttagcctctcgggagaggatggaaactaaagggcagtgaggcctggcatcggtgctgttgatttctaggtgacacttcccagcagctggctcatgctcatactctctccatccctggagatgtgagtttgtgtggcctttgttcacaatgcttagaaatgagagaaatgtgctccaagtgctgggtgactgcacactcagagctgtgatctagcacacagccttgccatggctatatgcagaggggctgtggaggttctggttccagatcatcttctaagggatattaaagcagccacagcctgagatttgaatcttaagctagttagttgcctgtctccctccttaaacaactgtttcctccttcacatcttgtaactatgtaatatttataagaatgggaaaaactccatggtgacccagttgcataacttagaaatatttagaaatatttttattactagcagtccagattcgtgggccacttcacccagctgtcaaatagccagatgattgcttagagctctgtctccatgccttccatggtagcagggttgatctccttttagtgagatactcttctacttggatcccctgctgttttaagattggggtgatgctggctcctgctggcctgagaagaggttcagttaccatcttcccacagaggggaggttgattaaattcagacgtagcctgaccacttcttgcatcctggagccttattctagagactttgtttgctcagaactctgtctgaggtctgttctttctcaggcccctctgctacctcagtacaggacagcttctcctggcagacctttgtgcccattacaaacttgttacaaacctgccagcattgcctgctaggaattctgggagtctgttaggacccaaacaggtcaggaagctacaagtccaaccaagaaactctttgtcatgaccccgtcagctgttggagcatcactcgggtgggttttcctgaggagcgtggtcaccagctcctgtggctgcccctcagcctcttctctagagaaggacgtgtggctcaggcacctcatttcttcagtatgtctcaaaccacatagctttaattcattgttccttagtttcatagcccttaaaaagagctcttctatattaaaaatcttgggttagcaaaatgtctcagcatgtaaaagtcttgagggcaaggctgatgaaccaagttcgagacctagaacctacatggtagaagggaagaacctcctgcctgtgtctgttctnnnnnnnnnnnnnnnnnnnnggaagaacctcctgcctgtgtctgttctctgatatccacatgctcatggtggtactcacatgcccacatacatacacatagaattaaataaataagtgtagaacaaaatttaagttaaaattcttgagccctaactaggtgtagtactcctgtctttaattccagtatgcatgaggcaggtgcaggcaagaattcatggccagcctggtctacatagtgagtcccaggccagttaggactacagccttttgtgcccattacaaacttgttacaaacccgccagcattgcagtattggggggggggggggcttgaggccgtcctctgccacactgtcacttagtttaattatagtatagcctgatgtgtgaatacttaaagtctagtttaaatgctgtgcccttaaagcatctacatccctatacaattgatgcatatttacaaatagctttagcatagctaccatgaaaactcaccaatttagtgtgacaggtgatggcatcccctaaaagtaagctgcctctcttctcaagaacatggtgctgatggcctggccgagcacacttccgtatctctcttgtagagatcccacccaccatgctcctggcttagaaccaggaaaatgagcactgcatgcagtcacctacaaggatctgtttacctgcagggatccatctatttgcagagattgtccacaggcaagagtcagtacacaagcagagattggtttacaggtaaatatctgcacacagagatccatccactatcaggaatccaaccataggcagtgatctgtccatggacaagggtcaatccataggtagaaatctgtctgctaggatttgtacacttgcctgggatccaggtatatgatggatataactatgtactatgtctgttaacatccgttgcctttacattttgaaaatttatcattaatgtgtgtgtgcatgaagtacgagtcagtgcatgtagagatcagaggacaactttgtagagtcagttctcagctactgtgggttgtgggtattgaactcaggttgtcagacatactggctgaaccgtctcactgcccacctttacatttttaaacataccagtggtgtggacaggctagttaacaccctgattcctaaagccactcttctgaacatcaggcaggaaggtgagtgacaaccagggctttctgctctacatcccagactgactggacctacctctgactctggtggcttccacctgcaacactgctgtgaccccagtatggtaaaactcataacagggtttgggacaatttcagtgttggaatctcatcatgactgccccttccccagaccttgacggtcttatttatgatggaacctggcatgccacgggaaggcgcatgctggctgggccgtcctttcccacagtgttccacttgagcatcgatgatgtagatgcattcccaaggaagaacagctagccaaacaggcagcagggtggagaagaaaccctccagagttgaggggcagctttctccttaatgggatgggaatttgggtttggggaggaagagactggaggactgagctcttcaattcatatcctatttccgcctttcaccaggtcttcctcattatacatcacgccccgctggtgaactctctggctgaagtcattctgaatggtgatctatctgagacatacacaaagcctgcacaggatgttcccagaagttctgtaagtcactcaaggactgtctacattttgataaggagcagtatttgctttgctaattcatatttctctgaagtaagaaaaagaaaacaaacaaaaaactacaacatttttattatacattagtgaggatgtataaggtggtctgggatacagggaacctagccagtctttagatgtgcacctggggaaatgtagagtctagcatgagcagtggatttgatcaatccagtactgctgcatggattgtatagcctttggtccttagatgttatgtatactgtttctgagacataatgagagttgatagaacaacctgtctaaggcacatatatccacggaggttgggtagtgaccattagtgaatgccactggtccagtgtgagaacattagggtgtgccaacagagcaatctggacagcttttccttgtgcacagctgctgtcccacccagcctgaagtcagtctggggagtatggatgccatattctcaagtcatcttatgtttccatagaggtggaagttcttggctttcaggctaattactaaatattatgaactaaatatgtctagccatgttggattctgcagagattagaattgcactttgcacactaaggaagggaaacacccggggccaggactgtgacttcctggagtctctcctgcttatctcagtactttgatgctttgatgtcattcctcctgctattattctcctcaggtgtcctgagccccatgttgccttgggactttcccaacttgctctttccccccacatctcacctgtggccttactatacccaccactggaaaggccctcagagatctcatcctattgagttcctatcacatctgcacttgataggctgtgacatgagtccctgcctgagtgcagtgtgaccctgtacatggaaggcttctgtgtgtgcacacatgtgcaggagcctgtggaggccagaatagggtgttggatcccacagagctggaggtacaggtgattgtaagccacccaccatcagtgctgggaactgaaccctggtcctctgcaagagcatcaagtggttttgtttgtttgtttgtttgtttgtttttcccaattttttattaggtattttcttcatttacatttcaaatgctatcccaaaagccccctataccttcccccacccccctacccacccactcccaacttggccctggtgtttccctgtactgaggcatataaaatttgcaagaccaaggggcctctctttccaatgatggccaattaggccatcttctgctacataggcagctagagacacgagctctgggggtactggttagttcatattgttgttccacctatagggttgcagaccccttcagctccttgggtactttctttagctcctccagcatcaagtgttcttaatagctgagacatctctccagacctttcttaagtagcttcttaagtagcttttgctgaatagatgtagtaatgcactaccaactcagcacaggcagcagagcccagtcagaggtctagcccctactagctggatagcctagacaagttgttttatcccacttggaaatcaaggaaagtaagcaggttgcaggggctaagtaagcatagacagaaaatagatcccaagtgctaggcaagtgactagcagattgcagcttgaccctcaggcttgcttggtgtgtttttcaaagtggtcagaagaaagtcttctaagatgccaacattgaaatgtagagtttcacttatgagtacagagttttggagacaatctgatcgttatgcacatttctgcagaaagcctctcagaggctgctctcaggagacatgtttgttgtttattttgccttgtccccacttcacctgctgctaattgacacttcatttatattaataacagtttaaaatgtccttttgaactcttttgtttgacaccattttcaagccccagtgtagtaaccgaagctcttcccagaatgtcttccatgagcagtgctgaagtcggacttggggttggaagatctgagcccagagttttttggggaactggatttcacagatggcaagaacatttagcttgttagtgtgtgtgtgtgtgtgtgtgtgtgtgtgtgtgagcacattcaaatatacatgcatgtatatgcacgtgtatgtcaaggccagagattgatgtcatatttcttcctcagttgcttcttacttggtcttctttgagataggtctctcgatgaacctagaattcactgcttcagctaaattggctgattagtggcctctaaggaagtgtctttctctgcctctactctgctttcccagctctgggaatacagataaacaccatgatgcctgtttctaatatagtacttgggactcaaatttaagtccttgtgcatgcacggcaatcgtgtttctgatggatccatctcccagcctcttatcaagtgtttaaatgcataatgcattattgttgccagcaggccagtgtctcacagatctcttaaactcattcatcatgttctccatgtgatccagagccaccccaaaacggaaactgtattcctcttgaaccgttcctacttccctgtccctgcaggcactgtcccaccctctgcttctatgagtttgatgattttagatatctcatgtaacgaagtggaatcatgtaaggtatttcttttcttttattggtttactacatgtagaatggtgtcctcaaggtttacccattttgctattgccaaatttctttaaattgtaaaggcagaataatgtattatatgtatatacccactttcttttttaattttgcgtctcttcttgtcatatactgattatacattacagattcattatggcatttttgtacatgcatatgaaatattttatcatattcaatcccgttacactctcttgtcccatctcacgcctgatgatctgcttccctttccccactaattcccctgctgctttcatttccttttttatttttcccaatgaccagggaatttcagtagggctctatacaggagcatgtgggtcctcccaccctcgaggatcatcggcccatacaatccacagggcaaagggagcagagatgatggggttggggatctggaagccctgtgagtccgtacagtgagtgactacgctggaaccaccctcggggcagatcaacattacttagggtgattgaaggcttataaagtgttaggggggctgagggtagggacatgcaggatgggcggaggtgattggctggggggcttagggtaccctaagcatggggaagcatttcagggatctcaggtgttggctgaacaggttttgtcaaaacctgtaaccaaactaaggctacctaacattcctcagagagagggttttggattttccagacaaggttagaaaaggagaagatccactaatgaagtgagtctcccatattctgctgatcccagaggctctctagtcatggtggacttcatcattaattagcagagttttcccacaagagcatgggcaccttaccagtagctacacaactaaagaaaatgtttctctgtttcccagaaactattactgccaataagtcctcacagaagacagagcagagcctgcacctctcctcccaactaccattaactgacagacaatatgtcatcaggaggggtgcggcctcgtgagctccctgacttcatgacacaacattggtaggtcaggtcttatgcacgtcatcacagcaattatgagctcagagtgcagcagccccatcatgcttgggacacagttttccacagcactccactccatcctctagctcttacatttcccaccttctccatgatgttccttgaagtttgaaggaggaggatgtgagtgtcccattctgactaagcattcagcaatcattcacgtctacccattttctttattacttcatctgctagcttgcagacttctaaaggacattttttagtgaggtaattgtagatttgcatgcagctgtaagaaataacacagagattgtccctggttttatcccatgtggatgcctacagaactacagtacctgaccacaagtaggacacaacaaacaggctgtggtttgcagcttaagcaaaagcacagagcagatggcaactggccacctctcagatggctctcaggaggtctgtcctttttccccatggtctcctcttggggcagaggtccagcctccactgtgggagacacacccactggttgcatgagtggctgaacagaaggagctggcacttgagaggctggtttctctgtaggtgttagatcaaagccccaccttctgatgcctgtagatggaaatcctagactagctgccaaggtaactggcagttgtgaattgtttaacagtagtcctgtgcaagttgcctgccttccctctgagtgacaacagtctcctactatttcctgcctggctcggatgtggttgatcaaacttgttttaacttcttggtcttttttaccctactttctccttcctgtaatttgtagataagttactggtattgcttcatttttaccagcagacctcttgcaaacccaaaccaaaattggagagaagcagaggagagacagaattatactgaagggctataatttagggttaaatttaacacagatcagaataggcagataaatgtctaattgaaattcctgtgtgcattaccatcatatggtaggcaggcaggcatgacgctggagcaggagctgagagcttacatcttatctacaagttggaggcctggtgtgggctttgaagcacagtgcacacctccagcaagaccacaccagctaatttcttcctaaatcattcaactgggaactaaacattcaaaactataagacagtgggggcattctcattcggactaccacacatacccaagagtggcaactcatatggtagcctcttctattgtttgcaaagtgattatgggttggaactggggatgtgcttcggtacctgtaggtgtttttttaggttaccgaaagacggagtaacaccagaaatggagtccaggctgatgtttaacttactgtatcgcatggggtagttggtcttaggtttatcatctttctgctttaccctcatgagttcaagggtactcagtgctggaataaatgaggcagcaaggccagggacagcagtcatgaggtgcttgtgactttgttgtgaagactctcagcatgctgtttcttgtgctgttcacatgttacactctgcatctggtacctgcagcagtgagtgcctcaaggtgtcccaggttgagttagtctgcgtctccaggcctcagtcttattgcttctacagctagaataacaaacatggctttgaagggagggcttctgctatgtgtagtgtttgttcttaggtctagcaccagttggtgcaggaatgttaggtgaggctgtacaacctcatcccctatatggggcctatataagtgtgcgtgggtgggcacgctgttgttggaactgaactatattcagcaggcgcttggggaagcacttcagatgcaggcaagggcataaagagggcaggaagcatcagcaataacaagtgacagagactgctaagactagagtagacattgccattggtgacagtgagctaaaccctcagcttgcactctgctttccaacttaaccaccaggtttcacctctaggtggtgcaaatattttatcactcatatgtgtgccaggactggctggctgggagttcagaatatcagctaagagacagaatagctttttccctccgaattagtcattgactatatctgtaggtgtcaggtgagccagttgggaaggtacccaaatggttctctggggagtgcatgtgcatctgtatgttacttacacttctctttatggctcctgccattcctctgcttagcagaaaaccctaccaggataagatgtatacagtcatcatctgagaccacaggagcctggcttctttgggtcatgtgtttgctggctcagagtgtcagagaccatctcggggacccttggctctgtcacagggctgctctgggatttgggtgtcctgctgaatgccttggtaggagtttatcttccagctgggatgggagctccaaggcacacgtgttttagtgagagggctgtgaataccaaaaggagcaaacagacctgtagagtcaagggccatcactaactcagtcacatgcattctcacaagagaatgggtctcagaatagtcttttctatgcagccactgtggaatctcagctcctggacatcctgtaagaagaggatctgagtgctgaaggaaatgctggagtgttctcatgccccatacgtcaagaaagacagcattgcattagctttagggactcaccctgggcataagttgggcttggtagctaaaaggaatcctgttgtattgagactctagacaggaagtctctaccaaggctgaaggtatcttggactaaagaccaggaccctgttcctggtccaacagggatagacccccccccaagacactcatcacttctggtatgtgtatgctgtgccttttctggattttgttaccagagtggcctctctgggtgcttgcagttcttaacaagatgtttgagttactctagtgtggttcaatgtatttatcatttttttcagaaagtaactgtaggtgtctcctctgtgtcaggcgtcattctaggcactggagatagaccagtaaatctaagaccctgcctcataggaagagagagaaatagtgctaactatagtaaccgtcacagcaaagacaccagaggcttggctctaggaaagcagcagcaaagtggagacaggacaagtcacaacagcgtgttcacagtggtaggaaggtgatgtgcgaacctagacttcaaggataaaagggagggaaccatggagttacctggaggaagaacattgtggtcaaaatgagtagctcgtgtaaaggccccaagatatgacatgtctggagctgaagcatggcatggtgaggtgtgggaagtagagaggagactgtcgggggcacatggagccttctggaccactggaggactccaatgctgatacagaggaacatgaggttggtgtgttcccagtggctggcatggttcctgaaatgaagtggctttgctattttgtgggttctttttcccattctttatctccccagtttcacctcctatcagtagatagaagagaaagaaggatagaggggagggagagagatagagatcctcaaatcttctttctatcttgtttcttctttgagcactactaacaaaccataaccaacactgctgaacgaccgccaaccaccaaccctgcctttcaggtccctcgcatttatataccctatgaaaagttaccagaatcccaaatgccacacaattgcagaaactatctgcagctggcaaaaccacacctttgctacagcacagggcaaaccatagtcagctgctacaaagcagccccctatcccacacctgggattaaaatgaaaacatattctaataatatttctgtggtttttttttttttaagaaactaaaatttcagaattctcactacagtgaagtgtattgaaataacagctcccaaggaaggaatcagatacctcatcggtaacaagccacagaaatcttctttgtcagtaccagaattcttaaatgaagaaacttcttgctcttgtttggatgtttcacctgttgggccatggacaaccactggtgagagtgctcactgtgtccatcctagagacaccggcccttggacactctacactctggtggttgtggtgtcagacaagcatcattcatcatgcctgaggggagtgagctctcctgggaggcggattgaaccactttctagaacattctgatgacacatgattagcagatcctgacaggcctggctgctgaccacttactgggctctcaacacctcaccctggaaggccttccttgtatccagaaaacaaattttgaaacgtcactgatgagaagatgattttaatgatctacagttccttgctttcagctttggatgagaaaatttactaaatatataccacacagaatcaacagaatcaacagcaagaagggtcagatgacagcaaacatcatccagtcgggggctgtatacaatatgcagcacagtagcctaactgtgagggcgaacaaaagcaacatcaaattaaggctttaagagtactcagcagaaatggactagtgtggcctcattgaggtagccagcagtggttttccagggagagttctgggtggagcaggcatcccctcaggcaaggcttccaagtaaaagagaaataacagcaagacagttatcatctaattgggagtgtacagttgtccagcagaagtgtctgggaaggcttgctgaagcaggctagagtttccaattgagacttccaggagcattcatgaaggagccctagcttcctgtttcttcagtagacatttttatatcatgggataagcaacagtaaccgtgattggaaatagttggccttttcagctgttttcaagggcacgatattcttactcttgggctgtttattgtcctgccctatccctgatacagagaaaagaggccagctcatcccagacaaggggttttggaggacacttgaaataagcattctagagtctgggtcaggagagccctccacactcccagagctcgctttcatcagacttaaaccccgttaacaattcaccaacataatgtagaaggaaaaggtcacattaaactgcatttcctgggattggtaatgcaagcctacagtctcacttctagctgctgaggcaggaggatcaagacctcaaggcctgactgggctgcagagtgagtccttgtctcaaaataaaaagcaaagaggacaggggagatagagccatggtaagctttattctcccaaatgattgaaaggctggagagttatgactgagatcatgacttggattcgccctactgcaagcagggcccagcctgctgaccatggacagctatggctcgtgatgcttagtgcccactttgagcatttactgagtacttacacattataggcaggcagctgctatgctggccttggagaacccagaatgaataagaatgaataagacacgtgtccccatcctaactctctgggatgagggtcagacagcgaatgaacacacactcgtagatatgagacctgtgtctgaaggacgggagacagtttcaggaggatcagccttggaggtagccttgggcctgcaaactgaggtcagggaatggagtcttcaaggaactggtggctagggacggggaggctgggctgtggagccagcagaggggctgtttttagcttcataaaaggcatggcatctcttgtctcatgcttcttttctagagatcaaaacagtgctatgccccagtctccccacaaggaagtctagggtcctagaggttgagtgtttgtccctctaggattgctagtgttgagcctgaacccattacagcttcatcatgaacttaaagcgccttccctaaagaaatgccaatcagctgcttagcatgtcattctttaatgagggatgtcagatctttccttgcattgattgaagaagctggcttgaaattcactaatcttatagacatttatttgctctttttttgaatgccagagacagttgctggcagggcgctagagctaggctggcaatgggaggagagaatggccttgggtgaagagaacaaaagatgatgctagttccctgtagccctgaccacaggtcctaggctacttcccagaaagtactatcatgatgtcacatgctgcctgtctgaaagcccaggtgctatgctaagcatggaccctggagtctctgagctctacaagtcctctctggttccaggagagtggtgtttcagcaagttcaatccttgcaccttcagtgctgcacccccactgttaacagacatagcctccattaaacaagtcacacatgctgggagcatgactaggtttaggttcattagctcatgctgccctacttcttggcatggcacattggcacatgtgtgcccatcatcaccccagtgtgtatgccatgtaatgtttgcttgttgaacaccttcttttggaatgagaatagtcttgccatggcctgtgggaagtcaggtgctgtggtgcctttggttatagaaggtgcaaacataggtcactgtgagttttagtctttgtatatattagatccaaatgcaaaataaggactagaatgttgttagcccaatgatcaagcacttgtgtggtgtgtatgagaccctaaattcaatcccagctctactaaaagacctaaaaacaaataaaactcataagcttttggtctacatagtacttgcttttcctgttggtcagatgtatacttgacttacactatttattggcttgtagaccaggtctctccaagtagcctacaccggccttgaactagtcctcctacctcagcctcccatgtgctgggattataagtatgcaccaccacacacagattatggctcagttttcccctcagtgcttctagaggccggcctgttgggtagcacagcaagtgctatggaaaggagcagtggtctgctggacactggattccattctagctccccgttacagtgtgagggggctagaggcaagctcctgcacaaatgtgcaagatcctcctagcagtgtgaggctctcaagtgctcactagtatcaggggaaaaggactcccaggaaagaccgacagaggtggctgtctctgtacttctcagcagccctcagggagaagctgataggatgcccttgggatgatggggaagttgaagcctacaagggggatagtggtcagcagtagccatggcttggcacttgccagggaggtggacctgaacatgtggttccctactggctttgagttctaggtcctgtctatcctggcctgaagtgggggtgttttgcaggtcagttagtagctcagtaagtgtattacccgttgagccatgtcacaagtctggacttcagtctttgtcatctatgtggactcccactgcagccatggctgaccagagtttcataacccttcctcacccatgggccttctctacatgtttccagctagtgctaaatgattatagtcttagagacataaattcccattctctgtaccttacctccacccagtacctggctagacagaaaagtaaatttccttggaaagttcttaaattcttttttctttctttttttctttgtagagacagggtctgatcatatagttctggctggcttggaactcactatgtagtcaggggtagccttgaactaatagagatctctctgcctctaccttctgagtgctgggattaaaggtgtgcagcattacacccatctgaattcatcctttaaaaaaccaaacaaacaaacaaacaaaaaaacttgttttgttttattgtggggaattttccaccgtgagccccgctcccctatgcatgaattcctgcagctgattttcctctccgtgtttcctttgtggctgggaagagaagggcggctgctgcactgtgtgaactgctggtccctctgcaggggcttctctccgcctgcctttctccctttcttccttccctcccttccttctaccctccctccctccctccctttcttccttcctttctctcttcccctcccccatggtgagctagccaagagcactcaagtagctattgggcaagggttctaccaccgaactaccggtccaaatcaggaggaattgtatatatccatgatttcatttggttttagaaggccagaacttctctgcatgcatttcaggcaaaaagatgaagcagttgtactggccttcagactgctggcaaccccaggcccttctgctactttcctttcttttgctagttattgtgactattaaagccattttgaatttagggaagacttgtcacagccctccatgtggatctctgtccttaacttctagtacacaggtgtttggtgtgtgttcagtttcattgtctgcacctgtgtctggtagtcctctcactgtgtggcatgctctaaaactcactgcagataggtgttgatgagtggaagcaagacacttcatcgtgggatcatctccaggagagtgcaagcccagagctgcacctgatgactgcatcctgcttgggctctgatggatgccgtctgtcaagctgtacatgctcagactgcccaatctccaactctgcaatatattatcttggtttcctggatagtagaatcatatttcaatttatctgtcctttttgtggttgaataatccaaaatgggcaaataaaaatgaatgtttggatttggatgctaatttagctctcaaatgggttttgtttcagacattattgaaattaatttgttttccttgagctcactccacttattggcaaggtacagtgtccctccccctccagaatatacttggtggctcttgggataaatttgtaagatagataatccataccaagataatggaaaagtttattctaaatcttcctttaaataacaaattgatgtttgaacatttagagtctggaaagataaacatttcaatcaaaattctgacccagacaaatccattttcttttgtcttttctcattttttagatgaatttgtttgcatggatatactactttttccctctgagatagaatcttgttctacccaggctggctttaagttgcctcgttcaagtgattttcatgcctcagtctccccaggtgtgtaccccatgtgttgagcaccattcatatgccccattcctctaccgttcattcctgagagtctcttgtggagaccaggctggccttgaacttggattgtggctgagaataacttgaacttttggtccttctgcctctatctctcaagtgctggcaattactacatgtgccaccatctccagattatacttttttctttttaagaactctaagtgtaaagccaaggcggcttccaagtagggcattgctgtttgtcaaagcattggggctttggtgctgacagcgtctgcagttccacaacctcggcaagtgaacagattcgacccttcaagctttggttttctcacctgtaaaatgaatctgtaatttctgcatatcatggttataaggagtttatgggagtataggacatgagcactggtgcctggggcctttcttgttctctgagacctctggttccctagagaaaattttttcttgggagctgatttggctttggctcatgctgactgtcttagttagggtttcattgctgttaagagacaccatgaccaaggcaagtcttataaaggacaacatttaatggggccggcatacagtttcagaggttcggtccattatcatcatggtgggaagcatggcaacatgcaggcagacatggtgctggaggagctgagagttctacatcttgatctaaaggcagccaggagactggcttccacagggaggctctcattccacactgggtgaagccttaacatcagagtcctcaaagcccacctacacagtggcaaacttccttcaaaaaggccacacctcctaatagtgccacttcccgtgggccaagcttattcaaacctccacactgccacttagcaagtcccctacagggagagctggtgcatgaccacatcttctgggccctttgcctttctgtctagcacttgcttttttattagcaaggcatgctgctattgtggctcctcagccatgtagtattttactgactgtaagtaaaagttaataagatggccataatgatacaagcccacaatcctattgcttagggaggcagagacagaaagggccatttgaaacctgtctcaattcctcccccctcaaaaaatataataacaataccagtttactgttgctatgacttctactttgcagggagtgtatagatttgaggctctgctgcctcctgacttggtgaccttgggcagctcattctttccttctaaactgcttcctcctctgtataaggaggatgactgtgctcttggggttgctggagactttgggtgagatgctacactctgagctctcaggcatagacagagcacagcagaagttttgccatgttgacaagctgatgtttagagtgcacagagctggcatgggaaaaggcagcatgttttgtgtacatgtgtacatgcatgttctcaagtgtgggactgaggagaggacctagggcttcatccacaccaggcaagtgttctaccatcagctgcatgtcaggccttcctttcttcctgagatagaatctcactaaggtgttcagattgttctggaactcactctgtagctcaagccgaccttgaatttgagatcattttgtctctgcctctcaagtagcctgagttacaggccttcaccaccaggcctagaatagcaagccataaatggtagttaatgttttagccagttactagtgatatggaaagtgttggtaatagtcctgctaccaactcaggagtagtgttagttgttttagaagtaacttgctaaggcaggccctctggcagctcgtggcatccattgagattctagcatcctgattcattcattgcttttcttgaactcacataggccaagcccagcatccggtgcttcattaagcccactgagacactcgagcggtcccttgagatgaacaagcacaagggcaagaagcggatgcaaaagagacccaactacaaaaacgttggggaggaggaggacgaggagagagggtctgctgaagatgcccaggaagacgctgagaagactaaaggtacagagggtggttcaaaaagcatgaagacaagtggggagcgtgaaggtgagtgtacccgggaacggacggccccttcacccacgccagccctgcagccagtgaggctctgtgtcctgttcttctcctgctccttgtgtgtcccctgggtgcttctgctcatctcagcacccaccagtgtacctcattctggacagcccaagcattcagaggcagtgtgggctgtgtaatagcagattcagtgcaagtcccacctgtgtgacctggagtaaagtctcctatctgtaaaaagctagtcacacatcatagccaccatatactgcattaccagaattaaatcacacagtcacctggccatctcacaacagctccaggcccttaggaaatgtggtggcacttgctgccgccactgctgccgctattgtttattgttaacatctccattcaccattatggctgctgttcctattcctgctaacttgagggtaggatttgtgttcagtatactgtgggaaggaaagggcccaggtttgttaagacagtatgtctttgatagctgatggatttttgcagtcactcgattaaatacagactcccttcaggttctgtagctgggttttacaggtcccatctgttcagagtgaggcgcaattgtgtggtgtgtatgcgctcagtgaacagaaacctgccttctttcaccctggcaggattatccgccttcctcacctctccctgtcttgtgtagatgctacaaccctctggagaacatttggtctggagttaaacactgcaggtagtcagttgcttgtatcagagaccaggctctttccactcagagccccgagctgaagcttgggtgttggcgataatgggactcttgcttggtgtgctgggtcagagcttactggctggaaggaagatcccacacctccttggacaaatgcaacctctttggagcatcccagctaagagtagtccagccttatgggccctgagcttaagcactgcagtcctaagtggctgacagagccatgcagagctttgcacgttgactagagcagtggttcttaaccttcccaatgctgcaaccctttaatacagttcctcatgctgtgctgaccccagccataacgttattgtcattgctacttcaaaactgtaattgtgctacttgctatgaatcactatgtaaataactgtgtgtcttaggtgacccctgtgaaaggatcatttgaccctcaaaggggtcataacccacatgttgagaaccgctgaactagaggcttgtttgcttttgagagctgtgtacaggtctacagccagcacataccctgtcatcccagcctgttggtccctggaatgactatcatggcaattgtcagtgaacaccacaatcacatgtcagtgagtctagccaaatgtctcctggtggcctactcttcttaaggctgagtaggtctctagcctgcttttatttgtatacattgtgctttttggtttagttggtacattcaattcatttgtggtctggaagcctttgcttctaagtatcagtttggcagtaaggttaagggataaacatgaggtaagtcacactcgcttattttccattgtgttaaggatttcactagctgggaagaaggtctagccatggtgtagtggcatggggcaggatgggtatctgtatcttgttttgcacaaggtgttctagtcaaaccatcttggaaagatgttgctgcttttgttccaggctttgagagatgcttttaggcagccacagctatgactaacgtggtatggacagggcaggcttggccccagaccctaaccttattgtcagccagatagctcagtcccagcacaaaggggctataggccagcttattgaggctgttatatcacttagggtgctgggcgtggagtgtggcttctggtgctgagacctgcccctgcacagggaggacactgttacccatctcccaacgtggggctcccaagctacacagattgtgccaaataggaccctagggtttccccagaggctagcttatagacttcatagctcatccaggtgtggctcccagtgcccctgtggccattttgctgccttgtcagttctcaaacacactaatcattcccaaacatggtggattgtcatcttcccacccagctcaccataaacacatagcatccacaggccttgctagtctacttctattctaaggcttcccaaaatatatatgccatcttttagacttatatttgaaggtgctgataatgaatgttttctcctcaccctgcatctctgtttgggcaaaagtgacagctgtgaaatcctgacccttggtgtcagttcttattgcaaaccaggatttgttcctatggagttgggtcatggggcaacggcagctttttcctaagctctgaagtatgtgtatcagcagcagggatgagagtgtggggtgctgggccccagctttcccctctccttgctgtgctgaggtggcgggtgcttgcttcttcctcctgtcactcctcctccaagcttcttttattgggcctgcatcagggggtgattaacagtgtgcttgtgacagacacatgtgcccctgcaccccccccccatgtctgctgcccctattctggtggcaaagaagtctccacatagaaaggtagggtaaaacagaagagtgaaaggggtatctcagtgggacggtttgccacagcttgatgggaatgtagaatgattggagttttgttttcttttgttctgtttttataaagtagctcccagaatttgcacttccatatttaggcccagacactgaagcacactgaatgtgtgcttttgacccatcttcactcatctccagcttacaaagaaatttgctgtccctcagttctcaagtcctgggtgacttgttccaaggctacaagattacagtctccaatttctgcagaaatggtctgttaaaagaaagacaaaggatgccttcgcccctcagctgaagaagctctgcctaagaagtcagacagccaccacatgtgcttgtttcttagctggcccttatttgaagggacatccatctgcttttggacttgcttagagcagtaagttaataatgaggccagcagaaagatggaatagccctaccacctcctgggaacagcagggctaggctgctggttttgcctaaggaacaactaggaattagttggctaacccaaccttcccagctcccttcctggaatcccacatgggcctgtcgtagtggcagaaggcaagactgacagcctagtcggttggatagaggggtctccggggccttgatctgctttgtcctttagaagtctctgtaagaatgaagtggaacctggcctcactcttgactttctctgggatattgaaacatgaatcctagtttttgtcttgagccacattgtagtttcgggtaagttgaaattctacagcacacgtccacctatagagggtctttctgattctcagcctgaggctgttacagtaaaatttcccatgtgacatgggaaagattctgcttgtgacacattagcagcccagatcatgatggaaggcagtaaaatgggaaagattctgcttgtgacacattagcagcccagatcatgatggaaggcagaggcatagagatacactctgggcctataccatcaacagtttctctagacctttcttcctttctctgttcctggtatgtatctgtgttcgtgtctgagcatatagaccacaacacacatgttgagactgttgagatcagaggacaaggttagtgtctgtccttaccctccactctgtgagacaggctttcatgttttgccgctgtgtataccaggcaggctggattgctgggggttctcctgcccctgccttatttcgtgatgggagcatggggatgtgagctggcagtgttaagggtgcctgtcttgtgtatctatcactgtctccagaactctttgcatcttgcaaaactgagggattcaaactctggtccccacacttgcatgacaactgttttacctatgagccatctccccagcccagcagggttcattttcagagtgtaagcatgtgggccaatgagaaagagacttggtagctcccctcccttccccccattatgtagtggggagatttttgcctgtgcctttcatacagacttaacaagagaagcatagagctcagggagggcaaatcctctaaaagccgtatgcccagaaaaatcactgtgttcaggagaggtaccaatgagcaaagaaggggacatactccagccagcccctgctattgccctagccaatttcaccttaaaacactgttccagagtcagccaatcacagccctctgtggttacctaggtaactggcagcatatctttccccttcccttgaccttcctatgaaggcctgcctttctccctccctctctattgtctgtctgtttgtggtttctggaacagagaatccagattgaagaaatccttgaattgtgaagtcaaagacttctgggatgtggtgcctgccgtttccccagagagcacttcatctaccagatatgactcctcctaggcgagtcagggagttagtactatcagaggatgggggaattccaggatatggccagagttgtcacatcaagaaatcaatgtctttgtgtcctgaccttctcggttctcccagtactgtcatcacttatgtggtatgtagaagatgaagatgcccttgcctgcttttggttcctgtctgtcttttctcttcctacttcatccttctcctcttcttcttttatttcttttttattgtggtaagattctggcaaatgaaccctcactactttgaagcatacgagtcagcagtgctaagggttccatcttgtgtgtccattgccatcatttccagaactctttggtatcctgagactctacctgtgaaacaactctcattctccctgcccccacccactgcagccatcattctctgcctgttgtcatggcacagctgctcttctgtacagatccttataagatcctacaggagctgaggacatagcccaggcggtaacaggcttgctcagcttaacctccagaagccctgtattttattttattttattttattttttattttattttataaaatggcacacttgtaactccagcaccaaagagagagagagagaaagggagagagagagagaacctgaggagaaccaacactcggggttgtcctctggtatatgcacttgagtcacacacacatacacacacacacacacacacacacacacacacacacacacagaggatagttactcctccataactgtgacaaagtaccatgaaggccttatttgtgtttatggttccagaaggttaagagtgctctgagggtctcacattgtgattcacggtaagaggccaaaagcgctaacttttgaaatctcaaagcccagccccaatgatagacttcctccaaaaggccacttcatctcaacctacccaaacagccaaactaggaagatttaaactaccttttgttaagtgtggggagatttcattataaattcaaataaaagtaattaataaatacctaaaatgaagagataaacaatgaatttggattaagccagagccacattatgaagtaggaatgggactagaaaaccctgttcaacccctgtttagttaggccaccccagctgtatactccgatttagtgctacgggcaaggcacccagagctgcacccagagctgcagtagatttcatgggaagttacagcttcccaggctggaataaagctagaagaagaaagatacaacagttcttgaagatgattctcctgagtggcaggagtaagtcactctcagcatcccagtctttataatagttctaactaaaggctaggtttatttcagaagtcattgtgtcaaacaatcagataaagtgtttagtgtgaacttctaaaataatttgaatagattttttttctaggaggacagtaacattatataatagtgctaaatttccctgtcctaaaattaactctcaaaattattactgatatacctttgtttttaaattttatttttatgtgtatccctttgtgtctcggtggaggttgtgctcccgagtgcagatgtcagtggaggagagaagagggtgtcagatccctggagctggagtccagcacttgtgagccaccccctgtcagaattgggaactagactcaggtcttctgcaagagcagtatgagcgtctaactgctgttttctttttaaagaacaggttgaggattctttttcaaaatgctttgggctaccatcttttcagattttgaaataaacattccatatactaagaataatgagttgttgtcttggggatgggactcaagtgtaaatgtgaaattcacttatttttcatatattctttgtacacagagccttaagatttttctgatttcttcatttgtttatgtagaaggtgggtgtggggaactagtgcatgtgtgtatgtatgtagaagtcagagcacaactatacagtgggtttttaggcttatgtggcaggtgcctaacctgatgagccatctcaccagcccctgactgtaaaccatgctgtgcataatgctcttaacagaaaccactttaaggtttagatttgggaatgacttgaattttgcattgttggattaaaggttgtggtagagcacattagaaacttgatacatctttaacttttaatttttccattaattattttgtaacaaacaaaaccaactctatttcttaagggttcttaggctaaaattctaaaaataatatttagttcccatccaacttctaatttatttattttgttgagcgtttgttgccaggtgactccaggatatacccagggccttgtatgcatgggcaaatgcccaccctgatgtatgccttcatgctcctagcagagctgtggactcttagatatatttgttttgatgatgatcataggaacatagagttcattgtagtgttcttctacaccagtgaaccgtgtactcattcaccctttctctgggcatctagaccagtaaagggaccctgtgaacaggtttctgcttatatctgttagggcttacgggaatgccatggctggcaggctggcaggctggcaggctggcaggagcagcttctttccatttcaccatcccctcgttccatgtctcttcctttggctcaaatttcttttttctctttcctgtcttcattggcagctgctttctctgtacagttggggatttctgaaagcagtttgctgcagatgggctctgccgttcttcacttgccagtggcaatacttgtctcatctctccaccaagtaaatcttggttattgtcctggtgtacttttgtgcattctttaccccaaacacaggcagatgtgtcagctacaacctcctgggaggttttcttactgtgtagtaagctttacagcctcactgcacttgaagtgccccaccccaccaggtggcctagtgttcagagctacagaacaatctcactgtttctaaaggtggcctgagagaccaggaggcagagtcccaggatttggggatctctcacaaggccctcactgtcagatgatggcttacagtgtcggagatggtggcagtggctgtgcaagctgaccttgtgtgcaaggccttcaggacatctcaggcacttactgagttcccttttaaaatgcacattaatagatctccttgttcatcatgtatatctttacagagactttgcatttaacactggttttgagtttatagtagtgtcttagttagggctttactgctgtgaacaaacaccaggaccaaggcaagtcttataaaaaacaacatttaattggggctggcttacaggttcagaggttcagtcccttatcatcaaggtgggagcatggcagtaactaggcaggcatggcgcaggcagagctgagagttctacatcttcatccaaaggctgctagtggaagaactgacttccaggcaactagggtgaggatcttatacccacacccacagtgacacacccattccaaccagatcacacctattccaataaggcacaccttcagatggtgccactccctggtccaaggatatacaaaccatcacaagtagtaatttttcagatgtgttatttataaataatttcaaatttaagaaaagtcgtgaaacaaaaatagtatagactactcatttactctttacttagtttccgattttgctgttttctactatttgcatttttacttgtattctccccacccgccccttcctcccaccctcttgcccagttcacacaaacaaacacacatgcacacacacgcacacatgcatacacacacatacacacatgcatgcacacacacttatgcacagttgttggagggataagtcatatctcatgtccttttcctcccagggcctccatggttttttgctaagaacaaggtattcttcaacctgtcaccatcagttcatagctcttttgtcgacagattttttttttagctattttattggattcttatatttactcccacccaacccttattccaccctaatcccttccaaccccccaacactaggtaggagagaaagaaggctagaggggaaagggggcatagacttctttagactacttcctactgattaggggtgttgggatcctagggccaagtccaatcttgtcttcagaatgtccagaaagctagcaatccagcaaatgcaacagcagggaccagcagcagctgccccaggctctccaaggctctcccatttataccctctctagaatcccatatctgcagctggcaaaaatcatggcccacctagagtgtaatacaatcatacttaatggccgtggacaacctgaagcagccccatatcccacagctgggattaaaaccaaaacatgttcacatagcgtaactgagttcttaatgaaaccaaaatgctcactacactctttcccagctatgtcaccgttgtctctgttggcctaaaaaaatgtcctttattgcacattctaaattcctacttcctttttttgagacagaattttataggtgtagcacgggatagctgcagattcttggtcttcctgcacaggtctcctgtattgacaccatgatgatgggcgcccttcatcacactgatcttttgaagaatgcagatgtgcttcgacctctagtgacttaagtggtcctcatttggtctctgaatgcttaagggtctgccttcttggctgatgtgggttaggtggtaccatgtccttttaagtgtgaagtttgtactgactctcagtcccagtattcccacattcttggcttccctgttatgttttgtctgtagtgaactcctctgtcttctctccaacacagttattctctgaggctgtaacaagccggaacagcgtcagagtcacatcgctcaattatgtagcattctgtaaataattagtggggagtttgtttgcaatacttctccatctgccaccctacctcagtatttcatgtgtccaaagtcaagggagtcttgtcagctgctccttcgtatgcttgctggattggcccacccccatttcctccttcagggtaggtgtggcacttactttaaattttgacatttccctttctgtgcagttcagtgttcttgttgatacaattcatatgtatgttttatgatttaatacatatgtcctgtgtgtcctggtcacatccaacccaagcccacatacacagaatcttcttcttaaaatacacagtgttctaaccccgaagactgtgcagacaggaaagtcctttgcttctgtgttccttctcccctcccacccctgacctttttgctgagttatctgctctccctcctctcccccatgtgtgttgtaaaaatacgcagatttagccaggtgtggtggcgcacacctgcagtcccaatactggagaggctgaagcaggaggagctcggccggtctggactacatagtgaacctctgtcaaaaaaaaaaaaaggaaggaaggaagaaaaaaagtcaaatttgtatttttttttttgtcctttttgctcataaggcagtgtggtagatgtactcttgacacttttctctgttgttgaggttctagaaggataaaaatccattgctatcacagaggggacatgtcacaggaacagctgaaaggtcatatcttgaaccccaagcagagagtgaattaggagttgcacctggcttttaaaaccccaatgcctgtccccagcggtatacttccccagtaagaccatcctgcctacccccccactcccgcaaacagtgccgctgactggggaccatggaggggcagtttatactcaaccgcccacaagtcctgtacagcctcagtacctagtaaaagctgccggcctccaaggaccttatcaggttagatgaaggcacaacatttttacatgagcccatcagggctgcaaagctagttcagcaggtaaaggtgcttgttgcataagcctggggacatgagttcaaatccccaatagtcaagcaaaaggccagatctgcttttgcgagtgcctgtaattctactgctgcgggggcacagacaggaggatccatagggatcactggttgctctgtaataagagactgttagtaagtcacactcaggtaatttaggtggaaaatgatagagcatgacaccccgtgtcctcttcttcactctgcacatgctcacagtcatacatactctcccccatacacacaatttacattttttaaaagtgctaatcccttcaacaagccattctcatttaaacagaagcctggctggtgggactggggatgactcaaagtataattgagggtcagatagagcccttgagttgccattagcagaatctctggccatttggtagctcctgagtcactggagcatcctgcttggcccattggtggaagctggctgccctggaatgaatacagcatcagcaagaacaggtcagcatggggccggaaggcaacacaagaccaccatagacactctggtatggcagaaagaggggttcacaggaaaggtcacaggctcttagagatgtgacagactggggagaccctttccccaaagccacttctctccatttcaaaagagacagagagctggtggagcccaggtaagaactttcactgtaaaacttagctggataaaattgtttacaaaaagatgaaaacctatcctgactttgaaagaactggtctacactcacctaggaaatcagctgaaactggagaaactcagtaggattggctgagcaactgggagcacagggtgacacagtcaggacttaaggtgctcggatcacctactgctggcttgtgtgccacagtgggagctggactagcttctgctgcatagagaactattgcacttctgggtgactctttctcagagttggttgccacatttggaacaaacaagaaacaagtagatttcaagtattgtgatgttgttattgtctcttcttttttttttttttgaaggtcctagaatatcaggaaggggctctgtagtgcccgagtgaccatgtgggcagacagttgatatttaccttctttgaccacagtcctatactcgactacctaccatgttggcatgccttggaaagtccctttgatggctaagggtgtggctcagtggcagagtacttgcccaatatgcacaaggtcctgggttctatctccagcattgcaaaaaagcataagttattgagtcacttgaaaaattgcccaactagcagtgagctagattgtcttgaactcttctcttgctccagaatcctaatgatgtccagggacaggaaaaggctgaaaaggggactactatgctaacttgtccgtcacacttggcactggaacttgactctgtgaccttggagagtcctgggaaacagtgttcccaccatgtcagccaagcagggtggagttctgcccgggaaagtgagctcacagcatgcgcaagttgggcctgggatcaccaggtagaggtcagaggccatagccaaggggaaaccagtgtcaaagcttgggagacttcaactgtctttatcagtaaacacaatgagatacaaacaaaataaaagcctgaatctcccaagaagaaacacattgattgtgattatacgtgttctcatcaccgtgttaagtcatatacagtataaagcaaacaaaatagataagaaaaagactgacctatcaaatggtcttgtacctcaatctggggaaacctaaggtgactaggaactagttaggtgttgaagagaactgtagaacaacaaggaaagaaaaaatggtgcctaatacagggttggtgctgtgtccctatgtagccatgactgaagactgtgtgttctgttgttggtgctgtgtccctgtgcagccatgacggaagactgtgttctgttattggtgctgtgtccctgtgcagccatgacggaagactgtgttctgttgtccactcagtaggaactgatgtacttgtttcttaaatttagcctcattgcacaaaagaattagctctttatgcaactagaattgtcttgcaatgcctataagatacatataaaacaattgagagacaacacttgcccacataccccttgaagattacttttggtgatagtgacctccctgtagaagactttcagctagcatctggcttcagattaagtggggagggcagggaacccagagtaagcttccagaggtcttcgtcccaagggaacatgtgtgggattgcctccacaccaggggctgactacaagtatatcatcactctaagagagaccagaaagagtgtgtgccagggaggagtgggtggcatggggacggtcagacatctcccatgagagaactttgtgaacatattgaacaccctaccccataccacagctgctacagcacattgatggtcctttctgcacccaaatttcccatattgtcctggacccggggagtgattcattcacatattcaagaggtgcactgtgtgatggggaggcagctatgcttatgaagcccataccagtagaggatagccaagagtaagtaggtaaaacagcagagtgacaatgctggtggtcagagatgctatagatcaaagaaacaaggtgatagacagagaggcactctgaaaaattccagataatttataccaatagtgttgttggggggtgtagctcaaagggctttgcaactaccatgcctgaggccccagataggggcccttgcactgcaaacagcagcaacactttctgttagactttgttccacagaacgtggcataaaaggaaaaggggaatagcttgaccctggggacacctgatagtagcatggccagtagagaattgacacctgtcttaaggtcatgttgccagtgtgtatgctggctatgatgtcacaagaaggatatttcccatatgtggtcttcctcttcaaatcagccccagcgtaataactgggggggaaaaaatcagacaaactcctgtccagggatttctcaaaatttctggccaggaccccatacactgccaagttcctccaaatccaggaaatcctgaaagcctcttagggcccagaagagtctccacacagaggtttgatctcatgagaccctagaaccagaaaggacatgaggagggaaagaaacctagacacagtgtgcagtttagttggtactcttaaaaagagctaagggaaggacaggtgaggacagtgaccaaggcatctccaaggaggtgacatttagctgagcattggaagatgtaaccgagtaacgcccatgtctgagaaagtgtgggtcatttgacagccagcaaacaatacgcctagcatggccagggtggggagccagcaaggcagagaaggccagggtgtgagatcagaggcagacaggccaggcgtaggaggagcaggccatggtctgcaccctttggatttcatcctgagagtgaggagaaggcgcggggagcttggaacaaaagagggacatgagcttgtttccacttactaccacttgggatagttctccaattggtatggagaacagatgaggatgagagcgtgtggagccagctaagggacaggcctacaccagtggagatctcagggaagggcatctgcctgagaatggccttagcacatgacaagtactcttgatggggacatcaggaagcacaggatcactcttgacttccagatgtttctactcagtgatccttaaggtgtgtgaaaataaaatatataccacaatttcagtcagttgctgttaagtttctcttctggagttgggaaaaacaaaatgagattcctaacttgtgtctccctttcaaaggttgtaaatagaaaggtggaaacatggcctctgtcctgccagagctgtttctaaagttagagagcttccgagcagttcagtgagttaggtaaggacatactagcctcatgttccatctcctgagctgccatcaaccctttggaaaggaaatgtgatcatgaccgagctaagtgtcttacgtcaggaaataaaacaggtaacttccttgtgtgtttgtccaagtcagggctcatgttttggtgttgctcagacaaatggacagaggtctggcctggacagttttttcctacatgttactggtatcttcccccactgttgaggtttgcttagcatgtctggagtgctttacacatgcttgggctacaacttgagtctctgttactgatgccagcagggctcagctgctctatgtttgcttccagagattgagatggtgatcatgaagcttggcaagctctcagaggtggccgctgctgggacctcagtgcaggagcagaacaccacagacgaggagaagagcgccgccacgaactcagagaatgcacagtggagcaggtgagcagcgaggccctgctgggagctcctggacagcccctcagccttgagaaagaaagggtaaacacagccatggctttctcctgctcaccatttgttccctttgcttcagcctctggccaccaggagacacaagctctgggggtatgtaagggaagaactggcttagtcacatcctcatactcttattctttgacaaggtggtcagtccaggacactaccacggtggaacagttggtagctaggctgggtgtaaaggacgtaggatgttcccaggaagagcctctcatgagtcaggcttggaactctcctctcaatccctgattgccatgcttgcccgtgtctgtggggccttgacacatagtgtgattcagtgctgccacctgtcctggccctgttgctctgacctgttattctcaactcagagatggtttgtgaagctgatctgtgtgcttgcagatcatcagctgctcctttccatgccgctgtggtgatgtgctcagatctgtaggatccaatacagggagccatgagcctgaaacattaacactggagctttgtgagagtgaggagaacaagaggttttgtttgacttggggctaaatggcttcttttttttcttgcattttagggaacaggggtttttaagagttgattgggttctttttaaaccttggatgactaactggttactgtgatcacatagatttctaacaagcagaaactaactcaggtgactgagccaacgggttttctgtgtgtccttgagcccaagacagcatccctagcacccacttcccagcctgaggctgggagcaaggagagggtaaaggaagatggtcatttgtttcccagaacatcagcgcatcagctgaatcttgatgtctattccactgtagagagaactggaactgttggaatttcccttgtacagagtttagcctacactcagggtcaagttagacccaaaataaaatacaaagattctcccctcccccccaccgccaaaaaattgttgttttggggctatcttagtaagtagctctctctggctggcctggaacccacagaggtgcacttgtctttgcctcctaggattaaagattaatgcaccacaactcctactcagcaatctttaaaagatatataagtgatgcacctccagaaaaatgtgaaaacttttcaggaatgcaaaataaaaataaaagttagtgcttccagatgctcctgtctcagtgtctcttaccgaccttttcaggaccacttgtccctaactcattcctgtcttgttttatttcacccttttgctatctagtaccaaaccccagcatctttttcacatcatgatcctgttagtaatgggatgcttagcggcttcaaaatacttcatatcatatataaaggatagctcacccacaagccctccccttgttttgtggttggtcatctgtactatttccaagtgcaaatgtaatccaaattgcaaccagctagcttacaaaaaaaatgttttatactttactctagtctcaaatttggtatagtcattgctagaatctcatagaatccaaatctgcacacagcagagatgtagacatatctagatggaggagctatctattgcctgggcagcaggagacaaggacccttttgggcactgtccccttaaggttttccttttaagttttgtgtatcccgtgtttatttgaaacgtgacaaataaatttttactacttatttattttcattttccagcttcacattttgtgttgatgcattatgcaactagggactcaggatgaggagccgcaagtgtcactcagtagcagagcatttcccactgtgctcaaggccctccactccatctctcatctgccccatcaaagcctaacatattcaagatgacatggaagattctgcgccagtgatctcctttggacagtcctattttctattttcttttttttttttccattttttattaggtatttaactcatttacatttccaatgctataccaaaagtcccccatatccactcacccccactcccctgcccacccactccccctttttggccctggtgttcccctgtactggggcatataaagtttgcaagtccaatgggcctctctttccagtgatggccgactaggccatcttttgatatatatgcagctagagtcaagagctccggggtactggttagttcataatgttgatccacctatagggttgcagatccctttagctccttggctactttctctagctcctccattgggagccctatgatccatccattagctgactgtgagnnnnnnnnnnnnnnnnnnnntattttcaatcctcatagatagtccatactgctaatgcccacatgttcttccagttgtaaaatacaaccttgatcattttctggattatttggctttcttgacctcagcttggtgttcaatggggcagcctcggatgggagcacagcctcttaccccaggcctgccctgtgctgttctgttttctgttactgaagtcttgccaggctaggccctaccctgggaagggcagcatttgggatgtgtattttccaagttgtggccactttttataccttatccacagagcacagaaggtgagagacccactatcaattcttctagtcaaggaatgttggcccaagaaattgctgagccagaacacaggcaaaataaaatcacagagaagcatccttgatatattaagtatagtaatcaagtgcagggcatgaccccgtgctaaggccctgcagtcagcctcctgggctggactgcttctgtgcaggtgaggtggggcagttaaggaactcaccagagggtttgtagcaggaagaagcagaccagcatttgaacccaggcagtctgatttaaccgtaccttcaaacatgactgtgtcttgcccagtgatctaggtctgttacactggtcctgtgttcatcttcattccttccgtcctttatttaaagtaatgatacatgtctgtgctgtctgccagttggcatgggagtatgaaagagcaggaactttgtacctaccatctccagagagaccaggtgaatgattgtcaagtgtctgagttgtctatccttggtcaacaccccccacccccaccccaatagcagctttccaaggtcagagcccatctctcatttgtgtggatgtgttcccagtgcctgattctggaccagacacatagtgcattcaccacaagctagtagccttagacctgtgagaagcaaagacaagatgttgtcagatgagagagggaaatgcacactgttccagaggcttacagagatttcctcttttccagacccttcctggatatggtgtaccatgccctggacagccctgacgatgactatcacgccctcttcgtgctctgcctcctgtatgccatgtctcataacaaaggtacgtgtgctccttacctgcctgagtatgtgacacagtgctggctctgtagcatccttcctcttcactgatgcaaagggagggcactttgggaaggaggttccctcctggcctctgaggctgacacctacagtgctcttctttagcctcattacaatttctcaggtgttttctgcagactgaagccacaggcattggtgactctggcgtggtggggagaattcaagtgtggctgtctaacccagtgtggctttttacagaccctctctgctttacagttaacctagctaatgaccactttcctgacatcagagacaaaccagtcaaattggaaccttgggtttgctatttatagtacttgatgttcttgccgtggggtcagtgctaaaactgacctgtgtggaagcataggtttcctttctgaagagagctgtgcttctccatctgctggaagctgattctggtgttggcctatcaggctccccacaggcaagtttggagactttcctcaagaatattcacaagagctggagttggcatagattgacacacagcatcaaataacattccatccaggaggtttacgttaaacttggtgggaggagatagaagtgatgctcactaagacagcctatgtctgaagcagaacagggtgtttcttatttattcctcaatcattagtcttgaaaattaagtcagttggcagcacaaaaacatctaatggcaaatgcctccccatctgctgttcaaggcaacttcttggtcagtttctcacatatcctctatgaacctcggtgaagaggacaaccaactgcaccatggcacctgtgctgcctgtgtgacctgccgctgggcctgctcttcttgccattagggttgacacagagtttcacatctgtgtggaaatgcctgttgggtgtcgaggtgataacttgttctgcatctccttagtaagtagcactagggtcaggtgttactgctcacagtccactctccatagcccccttacagtgaggctgcttttaccctgttctttgctgttcaggaacctttagcttctcccttaacctccacccttctgaccctgttcaatggagtatctagacagcacctgcttttccactttgatttgatttcaaggactcccttctcagacctttagctggagggttttcaggcacagcaacagaagtctggtagaggtaagcttgaggcagctctcatccatgatccatggccaagcgatggaaactgcctctcttccatggaggtggaaaggagaaacctatgaggcagcttggggcacctcacaggagcccagagactgatgaagaaccagggacggactggaaaggactgtagagacctcagcaatgagtactaaagagcctgcctgcaagggctctgatgtggtcccaggcagtcccaagatggctgcagcttggtgtggtgcctacctgtggaatgcttcatgtcgtctcggctgggatcagcacactcgtcctggtagccctgtgtctgggacgctcctttggaagcgcagtagccaccacaacactgacaagcacctgttcccagagagcctcacctccttatgtgcttgtgctctctctggctgctctctcttctccaagtcaccacttactcagtgtgcttccctctcagccttccactcagaaatcactttctccaaagctatctccagttctctcaagtaactctgggttaattctacctgctgtgaaattttatggacattgctagacttggattgctaaatttgtttttgttttttggtttttttaaggttgttttgttttgttttttgaggcaatatctcatgcatcccaggctaatttgggatttactctgtaactaaagatgacctgaactcctgattctcctgcctccaagtgctctgattacaggtgtgcaccatcactcctgcttgaggcagtgctcaagcctcgtctgtttagcttaatactctactaactgagctagagctgctatccccaactgttaaggatttttgtatctgtgttcataaatgatactgatctatagatttcttacagttatttatctggatgcactgcagttatgtaccttattttttttaaaaaactagtattattgctgggtggtgctggtgcacacctttaatcccagcattcaggaggcagaggcaggcaggcaaggcaggtcttcagagtgagttccaagacagccaaggctacatagagaaaccttgttcgaaaaacaaggggggggaactagcatcttcttctttaaatgttctttgaaccagcagagccatctggacaaggtatttccccccttttttcattgattgattaattaattaattaattttttttacatcccgaccatagtttgcccttccttcttgccaaatcctagaccctatccctaccgccaattcactactcctctgtttctcttcagaaaactgcagaccatgaatatcaactagtcatggtatttcaaattgcagtaaaactaggcacttcctctcctattaaggcaacccagtaggaggaaagagtcctaaaagcaggtaacagagtcagaaacagccctgctcctactgttaggagttccacaggaagaccaagctacacaactctaacaagtccagagagcccgggtctgtcccatggaggctccctggttagtggttcagtctgtgtgagctcctgtgggcccaggttaagtgattctgtgggttttcttgtgtccttgacctctgtgactcctacaatccctcctcctcctcttctgcataattctctgggctctacctaatgtttggctgtgggtctctacatctgtttccatcagttgctgggtaaagcctctctgacgataattgagctagacaccaatatatgagtatagcgactatcattaggaatcatttcgttgacttttctttgtttcttttgtttatttgcttgtttgttttgccagtcatgtttggttctatccttggtctctgggctttccagcctttgggccctggccctccaaggcagtgtcagggtgggattcctcttgtgacatgggtctcaagctgggccagttgttggctggccacccctgttcccgtacacacacacaatttctgggccacctttaccccagcacttgcagttcaaaggttttgtggtgacccaatcactctattggaagtcttgcctgataacaggatttagccagttcatgcttcgtgtaccccattgctagaagtcttagctagggtcaccctcatagattcctgggagtttcctttgcattatctttctagggatgctcctgattccagttgtcaaggtatcttctatgagatttttttttttatcttgagatcaattatgtagtcttagctggcctcagacttgcaatccccctgccttatctctaaatgttgagattgtagtactccagcacactcagctaaagggaagtctttaaaaaaaaagattaatttattttctatatatgagcacattgtagctgtacagatggctgtgagccttcatgtggttgttgggaattgaattgaggacttctgctcgctccggttggccccgctcactctggtccaaagatttatttattattatacataagtacactgtagctgtcttcagacacaccagaagagggtgtcagatctcattatgggtggttgtgagccaccatgtggttgctgggatttgaactcaggaccttcagaagagcggtcagtgagtgctcttacccgctgagccatctctccagcccctgaaggaaagttttgaccactgagtttctccatggaaatgttagagtatctcttatgagtgagctttgctgatttgcatctttcaaggtatttgtccatttcatctaacctgttaaatttattaatgcaaatttgttcatgattctcctctgtcatcttgcattgtctataagatcttagtctgggtccctgtctagtttgtgatattgataatttgggatcatcttttttctgaccacattggctagaggattatcaattttactgacattctagatggttttcctgtttcactgatttctagtcttaaatttatttaatacatcctgctgcttccttcagatgtaatttctcttctgtggtttcttaaaataaaagcttagatgtgtgtgtgtgagagagagagagagacacccattgctgtttctagagcactgtagccagactttaggctaccttatgggttcctatatcatccttctccaccctagtccctcccaacccccaacactgggtagaagagaaagaaggctagaggggaaagggggtattaatatagttagactagttcctgttgattgggggcattgagttccttggggcagttttgatcttcatcatcaagatatctccagccagcaaaagaaggaacagcagtagcagtaatccttttcaggactgtagcctagcattttttataccttctcatgagtctccacaattccaaacgtcacacattttcgatcatcaggcatgcatgtggtacacatacatgcatgcatacaggcaaataattcatatacataaagtaaaataaataaattccaaaaaactttaaagaagttcaccaacagtctcctcaggtgttcctaaagccaccatgctttccaacttgtgtactcagcggtgcacttagcctggagctcacttgttgtgggtacagattctaggcagaccctttgcatccctgtcgttgggaagctacacaggaggtgagagcctgcctgcaggagtcaggaatgatttttggaccatgtgtttgaggaagaagtgtccaaaatgaaaggtggcaaagggcagagccacagggtgcacagagccgggaacacatctgccactaggaacactagggtgggaaggtggcaagcttcaagccaggtgcttcaagaagccagcaggttggagtcatcctgggaggaagcgcagtggcccaagagctctgttcagtgagccgtggtggttatagagccagttgagccaggaagtttcatgcctactgcatccctcaggatggattctagtccagccagagccatgccagatgtggacagtgtaagtactggtgacactagcacatgccccatgcaaggcactgctgaatgaactgggacgagtctgaccagtcatatctaagtgaacaagaagaggactcaaggtgatgggaaagggaagcaggaaatgagaggtcagagcaaggagtggtagagtatagctgggtgacagccaaagcagccagggaagacttctccagtagatgggacaacttagaacagagccggaagagtgccacggagtaaactctgtaaggatgaagagactgctccaggcaaagcttgcagtaggaaagtggagacatattctaagagcagcacataaacctagtgagactgcccagggaggcatgtgacaagattcaagtttatgccaagtatagcagggaatccctagagaacttagcaggaaaatgccctcagagaggctggagagatggcttggcagttaagagcactgactgctcttccagaagacccaggtttgattcccagcacccacgtggtggcttacaactatcagtcaactatgtagatggtgcccagacatatatatgcaggcaagatatatgtacatataaactaaataaataataggaaaaaaaaagaaagaatatcctcagatgataagtttccagaggagcctccagctcttgggcttttcagagtaggggagtgagctgctggagagaagctgagcaactcatgaggaagcagtggagatagtgtgggctgtgggaatggagctgcagggtctgtgacagagttgggaatcagagcaggctacgccaataggctggacatcagaattgagtgtgaagggtacaggtccagcaagaggacgagtcagtggggaccctgcaattgttaatgagacaggaggagctcacagctgaggaccaggccttcctttgatgtggatgggaacaatctgggtgatgagcgaattcctgacttcagcttctctggacaaatagtgattagaactagtaaaattgggccatttaaacaggcaaattgaaatcaaaagctcaagtttgacacccagagaccctgacatcctggggaagctgctgatggagggactgtggcacatggtatgccagcctggccactgtgcccaggggctgccttgggtgactttgaatgggggctctttggctggttggcttactggttagctacatttgattccagcttctcttttccttgtcctttcccctgaaacaggccccaaataagatattctcttcttagttaatattttcccccttagaagacaatttcagcctgaaagccttgttaatagaaaccaaatgtgagctcaagccttccagtaaatcttaatagatgatacactgccctgaaatgaagggcccacagtgggaagggttgcctgacagagtaaggcggtggcatgattcagccaggccacttaataaattctggttagtatctgtaatagaaaatgtagccttcacctcggtcaagtctgagtggaggctgtatgttgggcggctctgtagtcctagcctctccaattcactccatgtcctatgctgcccccactgtttacccaggaggcactttgagctttgggatttgttttgttttgctaagaagttcctggaacaccaccaagaggtatagaaaagctgaaaagtgggcgacaagattgtggggatgagagctggcagataccactttgcagattgcagctgacacaagctcagactcagaaatacattagaaactgactgacaatccgcttagctctcagaacaattgtctaaagctcgccagtgctgccagtacctatgagaattcagctaggagaacctgaggtcacaagcaacaggaaactaactgggtgacatgttctcctgctcacatctactccttagtcaggcctctgtctgcttcctttgtctaactttgccaaaggtgtcttctacccttgacctgcctgtgtactgcagctaagaagaatctagaagtcagagttgggagggaagcttttaaaagctatagtgtggagccatgccttccctttcccttctgggctctttgaattagttaattgaaagtgacacatctctatacttacctccatcctgaccgttggcaggaaaggaatgaggaagcacatggcctgctgggaggcaggtctcagtgggtcctgtgctgcatagaaaggtatctttgaaagttttcttgaggcacttaagacttgtgcaaacaggacaaaatcttaccaaaggcttatctcagacagaaagaaatgactggcaaagaagctgtagttcatttgccacagagcctgcctttctgtaactgaaaaccatactgcatgtgtgggtcacccctgtgtgccgtctcacattttacatacatgccctgtcatatggtggcattgacaagaagagtgaaagtgaaggattgccttcgggtcatggtttagaagggttgcagtccagtgtggctggagcatgaggcaggttatcacatcatatcctctgtcaggaagcagagcatgtgaagtggccatctctcctctgctaaacctctatggaaacaccctcccagacagatccatatctgtgtcttctgtgtcgttccaaatctagtcaagtggactgcgcaggggagccatcatgggctttatttctccagcaccaccagacagtattttgtttagtcaggtagttaaaaatcccagatcaaatgcttctcgacacactggcttctcaagactgcttgtcacagaaaacaaaactgaatccaggccttctgtctcctggcctgtggttgaactgtcctcaattgctcagggtcttgtttccacagctgtttatatggtaacctttctttttttcttttctttctttccttttttttttttttttttttttttcgagacagggtttctctgtgtagccctagctgtcctagaactcactctgtagaccaggttggcctcgaactcagaaatcctcctgctgtttgtttgtttgtttgtttttcgagacagggtttctctgtatagccctggctgtcctggaactcactctgtagaccaggctggcctcgaactcagaaatccacctgcctctgcctcccgagtgctgggactaaaggcgtgcgccaccacacccggcgtatggtaacctttcttctgttcagttgtcatattgaatcacttttttgtttctttggttattgttgatttgtttttgttttacttgtttgtctttttggtttacttttggtttattttgtttatagtgggccaaaattgatttcaaataattaattaactaaagtcaggcaagatcaagtaaaggtacttgctgtcaagcttaacaaaccatgtttgatacctaggaccacatagtaaagagaaagccaactttcataggttgtcctctggccactacacttatgccaccataatagatataattaaaatctttaaataacaaaatgagttaattcagtgagtaggtggcacatatctgtaatccctaccattttcaggagggtggagagttgttggtcattcggaggctgcatgcatgacctttttcaaaaataataaagctacctctgttaagatctagtcagtgacctttgagttgagaatagtgacacacacctgggcagggagagggaagaatggacgagcaggatctcataatatgggcagaaaggcagaaaacggagctgactctgggctttctgccacctctgaggccttagcaggcttctcttttgagctcattttatgaagaatattttatttatctctttttcctgtgctcggggtggaaccagggccttgtaggcactaggaagaaccttcacaataggattgtgcccttcctccagaaaatactgtctgaatttgagctttttgattggttagttgtttggagtcaggttttggcacatgataagaccttcttgagaaacatttgattggtgttcaagggctctggctgctttcagggttgtggccatgtgtgttgctgcgcacaccttgagaactggggcccaggtagagagatgggttcaaaggaacagaggaggtcttagaggctgcaggagaggcagcaaggcacctgacactgaaagaaccaagatcttaagaggtctttgtgttgccagggtagaaaccagagtagaacccactctactgtttttccctggggcctgtgctatgcatccagaactgggagtagaaccagacatgaaacttaccttgagtggcctgggagatgaaagctagctacccaaagctagccagagcacaatgaaggtgatggctgtgacttcttcccaccccactggcttcccaccaacctcctgttaagggcccctacctcaaccctccccactgtgtgtaaactataatttgggggtgaaagttttatctgtttccattataactcccaaataattgacacaaaaatcttttaagttttttaacaaactgcaagcctaggttgggcaggttctgagctattctagtcctctaaactattgtatttcccagccacgtggtcctttaccttcaatctgagtctcactctggcttactttgctccatgtgtgtcctcgtggggaagctcttggtgaactgctcttcatactcctcaggactccccctgggacctctccacattgtcacctcttttcctccttcctttctgtctacctgggaccccctgacttagatagaaagtgctgccctattatattctctgcccagcacaggctaatcagctctttattaaccaatcagagataattggggtatattaccacactgatacaggagatgctcaataattagtgcacaagatgaccaccaccagctgggcctcgaggtttaccttcaaaaacatggaacagccaacctttaagagcttcaccagaaaaattccttctttggcctcctgcagcctgactttcacttttcttgagttggattttcttctactccttagtcttcccttttgcaacacacaccaaatagaagcattttagccagattgcaactacaaatttccataggtacatagtaagaggcggcagtgactgaatacccagtgacagcaattccaaggggagtatttactatactcaggaccctgtctgcataggccatgagactagagtgctaaaggctgtatcaagacagaagcctctcactctctgcagccagtgagacaccagcccaaggacacctaggagcttttggagaggtggtgactattgctgagccctggagtgcataccccttgaatgcagctttcatagtggaatgcccatgtgggtggtgccacccccctcctccctaactggatctcagccacctttggagtcatctccaaaaagaaatgagaaagcacagaatcactctgagccttgatttcctcaccaaaggccacgtggccagagtgaggggttcagggctctgggagcctggcagatggtcaagaaagaacaaaatagaaatctaaggaagactagaacagccctaaaaaggggcttccctatgaaaacacaagtcctggctcccactggctgacattctaggggactctacccctgggcctgtcactgtcctctgtaatggagcagttgatggtgtagagaaagtgtggtgtgcttgggagagagatgctgcccagagccacagagcagcagtcctgtcctgtgtccacccctcacaatggaaggaaagagagatatggggacaagattgacgccgctcggggagtgaaggccaaaaatattgggttgtgatttgatttttgccctaggaaccagagttcttccaagtcagacacttggcatcaagatgcagaatccacaagttcagcctcaaagcagttctgtgggtgtgagagagccctacagaacaccaatccttaggccatttcttcctttccatgtcatttcaacaaaacagaacactgctttatagcaccagcatgtgcacagtttctctgggaacccagcagtgccacctccactgtcttaccaagattctagatgaaacaccacctggtactcaagggttctgagaagcgccacctccctaactgggataacaggaaaagctaagcttcaggcataaacagtccacaggggtctctgtacttgggtcaagcactgtgtttatttctgcaagtatttctcaagcaccacatcagaggaaaggatgggagttcacagtgtcttgccccgggccccaatcattgtggcagcactggcaggtcttcctgccatctcagctcctggcacctcttcaggaaaaatattatcatggcctctgattacagacttgcccattccctttccttatccaccctccatcccaccctttcttttgtctcttattacatactatttctttccctggggtggggggtattcctttgtatcttggtgatagatatgctttattggtttcactttttgtccacctgcctaggctaaaggtttgagtcatcctctctttgttgatctactcctcaggaggagggctggcatctgccccactcagctcagagcctgccgctatcatagtgtgttgggcatcccacttagctctttgctttcatcagtgagagcttaaggctatgattgttggggcctcatacatctcagctctgttccttggtctgtgtctgcatggagaagaaagggctgtccttacatgcacagacttggcagagaatggcagtgagttgctttggtgaaagctgcttcttttctacttctgcctcatctgtcagaggtgccaccattggctccagggccattctcttcactgctaagtgcccgacagcccttgtttctaatagagacacagtaggccttgagccacagtgagttcagtcaacagtcattggctagaatgtgagaacactgtcctatatggctttcatagttactgttagttttcacaccaggttgatgtcctatttacaaatagcaatagcaaataaatgttttgtataatagtgtgtttgtgtgtgtgtgtgtgtgtgtgtgtgtgtgtgtgtgtgtttattcatgtgggtttagaggtgtgttgcgtgtatgtgtgtattcgtatgggcttagggtgtgtgtgtacatgtgtgtattcatgtgggtttattaggtatgtgtgcatgtgcatgtgtttggaggctagaggcaaaccttgggtgttccaggtaccatcccccctgctttttgtgacaaagtctctcactggcctagagctcactgatttgggctaagctgtctggccagtgagccaggatcttcttagtgctagaattacagcatgtaccacatactgtccatggcatctgaggattgaactcagccctcatacttgtgcagcaagcatttaccaacagaggcatctccccaccattggaacatgtatgttgtgatatatctatgcacgctcagtgtacacagaacccagacagaagctaaaccaaggcagtggccatgccagatgtcactgaaaagtaacatggtggcagtggctgcagaccccatcttcaaagaacttttatcttcccactgagcagctttaccaaggaccatttttcttctttctccatttcaggcatggatcctgaaaaactaaaacgaattcagctcccagtgccaagtgaagctgagaaaaccacctacaaccatctgctggccgagaggctcatcaggatcatgaacaatgctgctcagccaggtactcctgtcttggggtatgcgagggaacagattcctagccaggcacagaagctgtaggtcccagatctgctctttttgagaagctggaaaactctcagcttttcctttcccctaggcaccaacatctgccttctgttgcgggcaggactcggtctctggagctgtgtgcaccctcaggtgcaatcacacctctcttctccctcttgaccagcctttcttttctttcatcgtggctgggaccctcctttactcgggagtctgaggccatattgtggggatgaactaggctgggaatctgggtgaatcaacaggtttgaaggtcaggtgaggatacactctttttttttttttttttttttttgaggaaacattcttgtgcccattgtctccagtggtttggcccagcacccatctgtagccagccactgaggtgatgatagcagtgggatgaagctgtgggcctaggctttcccagctgcagtaaggactatttttactccaggagatatgtgactatgactagagacactttgaacagaatgactaataatgttcctggtctagtgctaagcacctcaagttgcccaggacctctacaggttagagttatctggcttggaatgtcaacggttgcatagtagcattgagggaactgtgtggtcagtggtcaaggatagggtcagctctggctagaacttgtgaaggcaggaacttgatggccagcagagggagtggaactgctctggagaggcacataacctccaagtggagagggagaggaggtctggagtggatagattggcctgcaggaatgagcagagaccaattttccctgggcttttatcatgctaaacagaacctgctttgcacgtttatagctttggcatttgtaagcacaaaattttctcctctgtttcaaccttggaacattagcgaatcagcgggctgttgtcttgggtgtgtccctgcttgggcctcagtatcttagaactcagggacaaagcccaaagactctctgttccctcattctcctactacacttccacctttccttagaaataaaatgcaaagggctggagagatggcacagtggttaagagcactgactgttcttccagaagtcctgagttcaattcctagcaaccatatcgtggctcacaaccatctgtaatgggatctgatgccctcttctggtgtgtctgaagacagttatagtatactcgcatacataaaataaataataaaaaaggaaggaaggaaggaaggaagaaagaaaggaaggaaggacaaataagacaaataagacagtttgcttaatagtagttggccttaggttaagcaataagtatcttccctaggagaaaggagatggcttccagtagcaagcagttacctttccaatgcagaaagtagcagagacccaaaagcattattaagccagcgcccaccccacccccactgccctaacagatttcataagtcagccattgtgtttgtgtttgcttatcagtttctgcttatatagtttaagctagtctggattggctttctgttaactgtgaccaaattgtgataagcttcgtgctgtactagccagcacccaggcctggagccaggtgctgtgtaaagtcccaggaagaaatctctacagacacccagtgtggtcagccccgtgggaaggagagtttggagcccctttctggacaccttccaaagactggtgatgtcagcaagggtggggtggctagtgctggctgtcaggcccgctcattcaggccccagagttgttcctggacttctgccatactgtagaactgagcctcactggttctgctgggcccctttgctgttgtttcctgatcaggaacaagggtgggaacacctagtactcagaagtataggtgctgaatgaaaaatgaaataagaggagggtctgacgactcctgagagtgcagacgagtcctgtagagataagggagataactgagaagtaggcagagggaagagaccaggctgggcatggccagcagactgaagtggaccatgagagtagagagcaagcgaggtagtctggccaagagactagtgtatggctgaggtatataggctgggaaaagggaaatggaacccagcccctgagagggaaaagtttagggtagtgggttgtataagaagtgctgagtttcagatttagcaggtgagagggcccaattctaagtcacatgacccacagtgggtcttacagaacttgctgttctatttcctcacctggaagaagaaaactgttctggacaggcacagctgcagcacagcctcccgccttcccttgctcacacccgacaaagggacccataacttactaggaaggggattgatatgaaatggtcccacccccactcccatcccccatccccaaagtgagaggctttggatgataggccaccaggtggtggttaacctcaaagaaggaaaataaggccttgtgtttggggtgcacactgggctttgtgggtactgggctgattctgctgtgctctacagatggcaggatccggttggctacactggagctgagctgcctgctcctgaagcagcaagtactgaccagctctggctgtgtcatcaaggatgtgcacctggcctgtttggaggtgaggccatgccttcccctgcccttcctgtactgtcgtccctcagctgaggagatcagccatgaggttcttggcactgcctggtctggacatccctagcttagctcagagaagctaggcctgagatacctggtacccccaccccaccccacccacagtcctgctgaagcccacttgtccggaggtgcctccctccatccagaccactggaagattcccagattcttgcattgtagtggctaattttggagtaatctgcttctgggttagccctgggagttttcaaatgttccttttgtgtgacaaaagcttttatacatgtaaaaacatatatctacctacagagtgtatgtgtatctgttctgatccactccctccccgcctcacacacacacacgcgcgcgagcgcacacacacacacacacacacacacacacgcacacacacacacacacacacacacacacacactggtgaaagaattttgtgttttattaaggaggagacattatagctggattctgtaactgactcccctgtttaactgagtcacccattgtttcccctcagagctgcttccctcacaccttccttcttcttcaacagggtgcaagagaagagagtgtccaccttgtacgtcatttctataaggtacttggcagcacaggcatacagtagcatggggtatctctcatggagtagggtggtggagtcattgtaggcaatgatgtggggtagatagatgctcacaggtttacggatgtgtattctatggtctgcatctagaggctagaggagaactttgaggagctggtgtactcctcccattgtggaatatgggtatcaaacttggctcatcagggttgcaccaaaagtgagcttacctgctgagccattttgttggcccttggagtaccttgtcacacttgtgaatgttgggcactagcacttaatcccacagtctcttacaagaacattaaaatttctcaggacttactattagtttatggcaaattgtttataagtaactcataaatttactgtaatttatgagatgtatgtggatgacaaagtcaagctcataagtgatatctcctaatacatagaaaacaactatgaatcacccatgattttatcaattacacattgttaatatctataagtatgcatgctaagaaaactcatggcagcatctgaagtatcatcttgagtttagtgagatgacctttaggatctgaaggatttggagacatttatcttcaggtaattcttgctttaagagatccacttataccagtgtcatacagttttgtttggctctgaccataaggcatgagaaaacgccctcagcagcagtctttccagacactgagaaggtccttttggctttataacctggccaggtgaggatgtaacatatgctggaagttgtttcgtttgtgtgagcatcatggtagatggcctctggaagtggaagaggtaacacagcagggcttttccaaagaatgtccatggtcagggtgggaggggagagaggagttatttggaggggggttagtttagtaggaataggcattgccctagagtcttgagagtgatggagagtggacggaaatgtgtgtaaagaatgccaagtaggccgggcagtggtggcgcacacctttaatcccagcacttggaaggcagaggcaggcagatttctggtctacaaagtgagttccaggacagccagggctacacagagaaaccctgtctcgagggaaaaaaaaaaaaaagagagagagagaatgccacttttcctagataagttggtgagtagatgaaggcagacgtggggtctgctgagaccactctctcaccctactacttcacatggtggatgagtggctcagaagtccagccgtgctggagtcatcctagtgatctctgcaggtcctcctggtcctggttcccctgaacaaggctcacacggttcctgctgggctgggaggtggcggcacagcccctctgtcccactgcccttgcttacactgctggtgctttgcactaggcctgccaccattgttggttttaattgagctaagcccaatcctgtaatctaaaactctaccttgccaggaccagataacctgatccagctgcagttgtagacatgcccagacaaaggggcagcactgtgggccaccactccgtggggaggaaatcccatgtacccttcagagaactgcacttgaactttaagcaaaagcatgccccttctagtccgcccagaagaaaaaagaaaccctggggctgcccagtgctctttggacctctctcttccccatagaacttctagaaatctgtctgcctcttgaatgcgctgatgttgtaaacacagaaaagcacagagtagccatttcccagaagctgcccctcggccggtctggaacagaaggaaaactgcgtttgcattttactcccagcccagggagacagggtgcttcttactcagttcatgatgtaggacagaggcagcactgacttctcccaagccctaagaggcaggctctgagactgtgcattttctgtgcattattttgccttcacactgagtggcctgatagacatgggctccagcctattcttttcaggcacacaacaccttttgccatcccattcttacagtgaatcaggtggtgctggattttgcccaaggtggagtcctatgcagtcattgtccttatcaaccaaatgcaagactttcctcaaaaacaagtggggctatccatataaacttagtgctagtactagcggttgtgcctccccacccaggcacgagcctcacatgtttaacatggtgacttaatagcatttcccactttcccaacctctctggagaagtaagtgatgttaagcacctgaaatattaaccttgtctatgttttaattctatattatgtattaccttcttttgttgttgttgtgctctaattatctgatatgactgacgaaacgccagctttcaacaggaggaggctgctgagcagcacaatttgatatttagcctttcatctgtacatgtgtgctcacattcccatatgtgttttagtttctggaatttacaagaacttgtaatgaaaagcaggcggcctccaaagccaagcacaagcacagtctttgtaatgctgtgtttatggagtagaagaagcttctccctactcccttcctatctttgcagggagaagagattttcttggacatgtttgaagatgagtacaggagcatgacagtaagtacaaagccagaacatacagaggctggcacataagagcatacagaggctggcacataccttcatgcccacaaaatttgcagagggctctgtctcatttggggctttctggtcaagtggcaaagattgctagtgaggtaaatgtgattgccaccatcacatcaacatcagggtatattcatcccaagcccctgaagtgtctgcctttattgcttcctcaccgtgtgcccttggacgggttactacattctgagcctggctgtttgtcagctgtgcagtggggcccatacctcttgagttgccccaagcagatataaaatactcagcagcaggcctcatgctgtgccaatgtgaaaaagtacatatgtccacttctcccctctcttgctccctggggttttttgtttgtttttgtttgtttgtttgttttttaagacagggtttctctgtgtagccctggctgtcctggaactcactctgtacaccaggctggcctcaaactcagaaatccacctgcctctgcctcccaagtgctgggattaaaggcatgtgccaccactgcccagcagacattttgatttttaatccaagacagaatttattttttaaacaaagcactgtggctgggcatagccgtgtgcacctcatcctagctatttaggacactgaggcaggaagatttaaacccaggaagtcaaaactagcctgggcaatatggggagtatctgtcctggggggaggggtgttatttgttttaattcagaagtacttatgaattgtcatttcataaaaggatacaggaaaatagagtgtggtcacagttttactctagtgattatggtttatcctgaacaatgtttagcattctccagaaatacgaaagggatggaccctgggccctgcgactgacatgagtcttcagctggtccttaggagatgagctcttgccagccgaggtgggacaggcctcacttagtgttgttccactgctgcattagatggtggcattgtgtctgtgaggtggtcagagtcacctgcatatcattaaacacagggatcctttattgagaactgactgcttgcgaaggtgaaggcatattgtatatattgagtgtgacacgcaacacagtctcatcttaaagaaagtaagatagtttattttagagccaaatctaagtgaccatgtctggtactcagattaccctacacatgttttgttaaggaacttgtttcatgaagtcacagaacaaaatagaatcataaatctagacacttcaaatccatcaataggaacatgaggtgacaggttataacaaaagtgaaggaggtctctattgtaggtctcagatgctgtctatgacagtcagattaccacattccaaaaagcttcacccaacagtcacaggattcgtgctcagacagaggggggcaaggaactgctatcaaggaagctacagatagaggacagagtttggctccaagcctgcaatatgccagctctctataaccaagactccctcaccaatctgctttgtagaatcgtcaacattagaattgctctttttctctcttgctctcttcttgctctcttgctctccccttccccattcccttccctgcccctccccacgtgctcatagccatggctgtcctctacttctcttctctctccctctctctgcctctactaccctcttaactcccctcccattccctgaataaactctattctatactgaagaagaagaaggagaagaagaaagaaggaaggggaggggaggggagggagaaaggaaggaaggaagaagaagaaaagctttttttttttctttttttctcccttgggaactgttgctattgtcttctttatccagctgagggaaaacaggagtcagagaggctgagtagtgtccctaagtctgtccagcctgctcgtgtcagctgggcctccatggagagtgatcctctgtgctgcttctctagagcaataagctcaggtgcagtccctgccgtccctgcctctccctggagcagaggacagactagagatgacagctctctattttgtttgtctctcagtccccaagtagcactcaataaatagatgacaagtgatctttttcatggacataactcaccaaagcatgaagtgatggggacatttataatgaacataagtgtttaaagtgtcagaaagagaagagcagacagcatggctaagtggctccctggcttccatacccatctccagggctctggcagccgagcccttacctcatctttgtcactgcccccctgaagcatccatggatcactttcaaggtcatacctccttttcacgtgtgggttgtggtgactgtgcctccaccttactgacccacacagccccagccatgcctaggagggcatggtacttccctcttcacaccatcagtcacagtggagcactgcacaggttttcaacgtctcctctatctagtgcggagtcccctcccagagtgctcctccatggtgcccctttcagcttggaaatgttaactctacaggttgtttatgatttgaaaaagttggggctcccaagcccctgaagtgtttgcctttattgcttcctaactgtgtgcccttgggcgggttacttttaatctgagtctggctgtttgtcatctctgcagtggagacctctgagttgaaatacccagcagctggcctcacacaggacccataagccaaaagtgtgtcctctccctcatcccaccccacaggaagtgtgtcccctcccctcatcccaccccacaggaagtgtgttccctcatcccaccctacaggaagcttcctggggtttgcttcttttactccagtgtttatgcgttctgctggacaatgcttgccattctccagaaacactaaggcaacacacctgcaactacagtcagtcctcagctgcccctagaacactggcttctgagctagcgtgagtgagtgccactcaagctgctcacacattctttagtgactcaggtttattaccaaagggatgacagaccctgagactcactgttatccccacccccatggagagaatgggaggaatcccatggaggaggtcctggcactgtaggagcaatggaaccaatctgtattgtaagaaggccctgctgtgaaaccagtgccaagaacagcctggagtgggaacatggctctgccaccctgctctgggatacagggattttgaaaaagggactcaggcctctggaaaacagtgttaaacatgtcccacaaaggaaggcagccagtcagcactaggcggtcatggggccctctgacttaaatgaagggaaaagtacacacacacaacttggagaatgaaaagagcctgccactcatctggcacacgagaaatataggccccgtctaacccagagctggctcatttgtggcccaagtacaggagggcctttgctgaggcttcctgtgctgtctctcctagataaagcccatgaatgtggagtatctcatgatggatgcttccatcctcctgcccccaacgggcactccactgactggcattgactttgtgaagcggctgccatgtggtgatgtggagaagacgaggcgggtgagtaagtgctttctggcctctcctaggccatagggaaagggtctttagatcagttgaagcctaccaccaataggtgtctagtcacctggaaagaatagcctcacgcatgcacctactaccatacatggctttctttccaaagcctggtgcccttggaaattggagattgagattctgtggcaactggcacctctgtgggctgctgtcagactacctgcgccagggcagagtgcagccaaaaccctggatggaggccaagccaatcttctttgaagcaagggaacccagagcctagaacagccagtgtgggaggtggatgtgagccctaggcacactggcaagctgtccgatagtgagaggatggtgctggctgcgcaggagagcgtgcgtacagagccctgttcttagaacagcagaggtgatccccttatcagcactttgttctgaggcggccgctctaggaagcagcctcgctcaggctcttcacagtattttatctcctgcgtaagatctcggtttctttcttagaaagcagcactgccttttcctggaaaatcattccctggagacatgactgggagtggataatttagaggcactcatgatcgctcccaggctcactacatcgtccttggtctgcttgtggcttgggggtctcactttaggatttcagaaagcaagtgacataaagttgtgtgtgcctcagacaagaacctctgtgacctcctccgccctgctggcacttttaaccatgtgctcaggggctacagaggaagtggagactttgtatcttcaagcaacacacattcccagccccctgagcaaaccacagactcctgcaagttgtcctctgacctccatgtgtgcacacaacacaaatactttttttaagtgtaagatcaaaataccaaaagtgcccctgactcctgccagcccataagggacatccatgttgaaatcaaagtcatcacagtttggggttccaagcagaacttgaatttgagttatccccactcaggtaggggcagttggaaggagtggctgagaaagaacatgagttccttagtcaggcctacagaggttatagctgtgtgatcttggaagcattgtttaagtccctgagcctaaagttcctcctgtgccccctcagcttttgcccacagtagctggcaggatggctgtgaagtttctggccgacagtaaacactgaaagtgtgttggtgggaaaggagtgcaatgcaccagtgtcttaagatgagcgagaggttccactcaaggactcgctaagcttagtgcagaggagagccagcagggggcgcgggcaaatggtaaagtctgaactgaagtatcagctatctgggaagccactgcccaagggtccctgtgctagggtgttgtgtttggtactagggatgaggccagagcatgcacatgccagcacatgctcaccctcctctcagttttgattgagacagtgtcttactaagtagcccagattggcttctacctcagcctcccagatatctggaattacagatttgtgtccccacattctgatcccatgttccctgtgggcacagcaggtttttatgtttgtcactattgaccttgaggaaatggggtggctgtgtgttacacattaaagaaaactcagtcagagctcagcatttttaaaggaaggacatttttcttccatatttcaacacttagagacatttgcttctcctcccatctttgtctacaaactcagccccttatgatggcacaggaatttttgccatggtgtcacctgcatcttcctttgttcattgtattatgaggtttcctgttgtaagcgtggttttcgcagctctggacaagcttcccagttcttacatgctaccagtgacatcaccccagcctacaggggaggggctttcctctctttctctctctctctttctttctttctttctttctttctttctttctttctttctttctttctttctttctttcttttggagacaaggtctcatgtaacccaggctagtcttaaactcactatacagccacggttaactttgaattcctgatcctccttccactacagctcaagggcggagaacatagcctgtgccaccacgcctgtctgatggttttctaagtgattttttagggctgcataaaggttgtcaggagttctctgccacagctcccatgggttttcccattggtcagagtttagggcacctccatgtaattcactcttttcagctgagccatgagagctacttcatgaacacagtgttttctttctcttgaatcatttctttaggacatgttctcagaagcaggatttctggttcaaagggtatggatttttttttcatctctaacgtcaccacctagctttctctctgggccaggcccacatccagctgcttcaaccctgttttcaggatgacttactttcacagctgtttccatagccttgtgggcttctaacctgaatgactgtcacctaaatacaacagcttgcaaatatggcaaggaagctgacagaagtgacctgagcacttggtccagggccacctgtgccatgaaaaaccctcactcaccatgtactcctccccagagctgagcagatactaggaactcctgctctcactcagccaggtggagctgagattcatcagcctccagaccttctcttccaaagccgctgtatgagctgggtttctacatgctgaatgtgactggggatggcttccagactcggagaagctaagaaatggaagtttcttcatattagacctcggtcaactgtcttcccttttgaaatttggtctcctgggttccaagatttgaaacagtcatcatttcttattacttttggctatgacattaaaactttgtatcttgagccgggcgtggtggcgcacgcctttaatcccagcactcgggaggcagaggcaggcggatttctgagttcgaggccagcctggtctacaaagtgagttccaggacagccagggctacacagagaaaccctgtctcaaaaaaccaaaaaaaaaaaaaaaaaaaaaaaaagaaaaagaatataaaaaaaaaaaaaaaagaaaactttgtatcttgatttagcaaagaaaagaagagtgcttgataaaaccatgggtcccaagccctgactctttggaggccaaggactgtgatcagaaaaacagtctttggagtctgggcttccatctctctgcttgtcagatgggaaccacatagggtaattaagaggtccagctggcaggcagctgggcacagtgatgcacacctttattcccagcactcagtggggcatgggggtgtgcagaagcagtcgaatctctatgagttttaggccagcctgatctactgagtgagttccaggacagccaaggctacaggctacatagagattccctggaaagaatgggggtgaggggaagccctacacagtgctcaatggccatgagtggtgagagggagctgttagtatctctaggtggtggcatgaagttgccatggggtgagacagcatgcatgccagcccctccggctgccctgtgggactcacctctttctgttcttagacatgggcttcttttgtatgtggctttcccttgagagttggtatttttaaatggtattatatatgttttatagtctattttatagtttaaattactatttttatttgtattcctggaaatatcttccattcaacatttgcagagtaaaagcagatgttttaccaaaaggcctacattaagagccaaattctgaattcatagattccttggaaagcctcagtcttccaagggataggctgcagaaagcagcgtgtgtttctgttttctcatcccagctgtgcccccgctgggggtctttgccatcagaaccctgaaagcaatggacttaacaacatgagcagactgggacatgcatgcagtcggttcttttctttccttctcctcatccctgaagttgtaactgcttacttaagagctctggctgtcatataatcctgtgacacctgctccccacttcacatcttattgctgtcttctttggactggcacagggattgcatttcctggtatacgaggctgtgtcaatgtgtgcctgatattacagaggcttggctcagcgccttagcagctgtatgggccaagctcactctgtcctatcagcacctctcagcattcttgctcctgtagtcttaaatttacagtatagaatccctgaaccccagcacatagtaggtgcttactagataggaactcatgattttttttgtttgtttgtttgttttgttttgttttaatagaactactcctctgtttcttccagttggtacaggctctatgaagtctagactttaaaatcttctaaggacattcaggttgggtcctcctgcctccccaccattactgcagggaagctgactttgccctgtagtccctgtttactcagataaggccagggctggggagtactttctaagtctctacacgaggtcctccaaggcagaatcagggctttgttagctaatcagagatactcagtgcctgagccactcagatacaatgaccttccagccctttgaagttaaaaatttgttccctcttgtttcttgaaaggtctttactagataaagggtttctccacttcttgtaagctaggactgtcaccatctttgccacaaactggaaattcacctgtgtgaagtcacacagtcatttgtcctgatattcctttctattggtagtagtatctatcaaggacctggattaccaccccttatggcaggcctgtgttggctgtgccctctagccttgtctcaggactgcagcataaccagagagctcagggttactgtgccttgttcaccatagtgggattgggggccagtgctgaccttgcctctggaactgtattcccaacgtcagagagagacctgaaggtaccctcaccagtggcttgccttgtgcttctgggctttctgttggtggcagtcttatttctcgagcttgagggctacttttgcacagatactcctagcagctggtatctctgacctgttctctgctctcaggacatgcctggttgtcacactggatgctgacttttttcatgggtcaagggtgcttgtgctgacaagctgtgtctgcccctgagatgagctgggagagcctgaggggctcacaaggcactgctgtccattggccaagtatcgactcacctgtctgtcacattcctcctaaagcccaggcccaagaggcgagagatgagagttggactctcattgagtctagccagacctaaagcctacatgcatgctactgtcctgtcttgtgctcacatttactggataggactggcacacaaactggggattactgtctcccagccccactcagttggagtggcaaggaagttgtagcccctcctgaagtgctgactcaggcagcactcctcaccttcctggctatttgctggctgtggactgggcaagctagcagtcaggagatcaaaggtcaaagtcaaaggtcatgagtcaaaggtcatatgagccttgaggacaggtcctggcaaatggcaggtgcccagtgaagtgacccaggcttcaacctgttggggacagaagcaggctctcccctgaaatatcatcttcctatgacatctccaggccatggtgcttcaaggcctgttctgtctctcttcctttccatttaacctagagtcaccatgcaatgccttcatgcagggcacctaaaaaacacctttaaaactccactctcctctgctttctgctctatccaggccatccgggtattcttcatgctgcgttccctgtcactgcagctgcgaggggaacctgagacccagttgccactgactcgggaggaggacctgatcaaaacagatgatgtcttggatctgagtgagttggccatcctgtctcgcactagtgggccaggggatacaggctttgctctgtcatttgacctgctgtgctgtgggagtgtgtgcagcatgcattctgcactgccgctgacccaggaccgagcagaagggcagtgctgggcagcagaaggtccagtgagagtgggccgcactgacatgagaacagcactggcctttctggtgttgtggattaaagagtttctaagtccagtggaaaaaagattctcttgatgccaaaaggaagcctataaaaaatacattatcaaaatgaaaaggcacaacaaacccagaagcacatcaccagtatttaggtaagaatgagggctttgcaaatcagaaaagcctgtgcccagcctataaccttgaactatgtattgaccattgtcttagagagtgtttctattgctgtgataaaaaaatcataaccaaaaccagcttaggtttatttagcttacacttccacatcacagtctgtcatcaaaagaagtcaggaaggcaggaactgaaactgtggaagaatgctgtttattgtcttatttgttcctcatggcttgctcagcctttttttggaacagcccaggaccacccgacacagcaccacccacagtgagcttggccctcccaattcagccattaatcaagagaataccaataggcataaccacaggcccatcttgcaagggcattttctcaattaaggttcccttgtctcaaaagactatatagcctgtgtcaagttgataaaaaaacagacaaaacaaataatgaggacaccatcattcattgcttcaaaattccctctgcaatataagacaaaatatttattttattttattttattttattttattttatttttgagacagggtaggcatctctgaatatgccaggctggccttgaacttgagattgctttgcctcacttccaaagtgctgggatcacaaacatgtgtctccatggcaagttaataactgggatttaaaagagactgtggtatttccagagtccttctcatacttgtatggctttctcttcccttcatttaccatggtacacatacacactaaaggacacaggttttcggtatgttagagcattctggtgcactaggaatctgtttttaaaagatctatttttgctgtttttaattatgtgtgtatgtgcaggaaagagatgggggttgagggtgatgaatgccagtgtcctggagcccagtggcatcagatccctggagttacagccatgaccaccatatgggtgctgggaaccagagctaggtctctataagagcagcaagcccactaactgccgagcattctctccagctccgagttagggctcttttaagaaatggaaaagccgctgggcagtggtggcgcatgcctttaatcccagcacttgggaggcagaggcaggtggatttctgagttcaaggccaacctggtctacagagtgagttccaggacagccagagctactcagagaaaccctgtctcggaaaaaaaaaaaaaagaaaagaaaagaagagaagaaaaaaggaacagaaaagccaaagcagcctggcagtaggaaaagaaagggctggctggctaataatagtaatgttatcctcagataaggctgagcctggatgtcgcatccatgagtggaaagctgccctttgccatctcttgactctgcttccctttttccccatctagtagaaagatggctaccatcagccccagctaagtagccctgacagaaagaactataaaaatccagagtaggctttcagtagcccggattggacagtagatcttttcctcaaactgtgcaattgtcagaggacgatcaggaacctttgccaaggacacagggttagctttgaaccctaagtgtgaggagggagacccaagagaataacctcgaaggagaggtgcaggcaaggcacacagggactgctctgtgtccaggtgtttgaaaccatccttctgaggcatgatttatatataataaactctaccaacctcggtcagtgagttctgacaaaacttcatctgtgtaaccagctctcataacagtcattgagtgctagctttcaagccagctctgccctacttcttgtcctccaccacagcctctgtttttctctctataaaatggggattgttgctatgaggtagtggcacacacctttaatcccagcacagcagcactcttttaatcccacgcagaggcaagcagatctctgtgagttcaggccactctgatctacagattgagttctaagacagcctgggctacataaagaaacccccgccaccgaccacccccaaccccatcccccccccaaaaaaaagttgtagttgcaggtagaggactcttagcatacaaggctccatcctccatccttaccattagaggaggaaaaggcagaaaggtggccactcttgtttagtgactgggtgaaaggtggcatgaaaaccacagccacactcctaacctgagcagctagtagctcagcacaccagagaatcctacctcctgcacggctccaggttgcccagtgtgggtccctcaccgagggaccaagatgccaaagagcccctcactgactcctgttcctctgccggcatttctcgtgtttgtgctttcatctctccttgtgctagaaaagaaagaaattatgaccctctttgcctgtttcctttgacccttcaccctgaaaaacagctgtagtgatttctgtaaggctagaattgatcgagttggccaaagagaatcaggaccaggctttctctgatttgatccatgcagagagggagacagctcccttcaattttacatccgtgaaatggaattaaattttatgctgggaattcacattccttctctccttcccctaggaagggccctgctgaaataaaggttaaaagtatttcacttatcaattttaattgattagttgctagttgagatcacttaactgagccttatggtagttggccattaagaaagtaatggctggctggctttacccagcctgattgcaaattatgtcttttgctaaagagcatgatgttcagaaaacttggagcaatagggattttaaaacctggtgctaccatgttgttagctgctgctgctgctgttggtttggttggttgtttaaaattatttttggtgattaaggttgaagatcatcatacttgaagtacacagatttctataaagctgaccgtggaatgggtggatgatgcctgagtgattggaagcctcatatctttctgtcttcattccaagctcagaagctgatctaaaaaagcgaggtttgggattggtgcatgataaggtctggtagtcttaaagaaattctgactttacacacagcaggaaacatgacacaacaaatatttgttgacctcattgtactgataagaaacacagccttagacaagagtctgctgaccagtaacgggtctttggtcctgcatagcagagctgtgcagcaaaggtgtggtcaccttctgggtctgctgtgattgaagcctgtctttgttcttctgaaaaggaggctggcgtacggcagaggtcttgagctgtttgctgtgtctgctgaatgaaggagggaaagaagagcagaggaggaaagagaatttcattcagggaatagcattctgactcactgacctctacgcctcagcctgaccattagcactaagtctgtgttgtgtgcccaagcctttccttttgcagtgcgtctgcacccagcacacattaatagtcatggctttttcaacaaagaaggaatcaacgtattcttgttagttgaatgagtagccactgttttgcaaatcccaagactctagggtacaagttgctgtttggagttagaggtggaactgtgttcctctgatctcagtttgccctactaatgtcacagacggcctgtggtagagccagaagccaactgtgatctgtgtttgagatccagcctaagtttttattttctgtttattgatggatgagtgtaactatgaaggctatttggttttgtgatgctgggtattgaaccctgggccttgcacaacagaggcaaatgttcaatcactgagctatgcccccagctttctgtgaatgtcataaagaacttgcagagggtcccatcccgtgcccctccaccctgccatgtttcaacagttccctccaacagctctgctgttttctctgttccgcttgcagagagcgcttaagcccagtgagcatgcctgactggactgtctgagtgcctggagattcatttccagaaaacatgtccagaagctcccgagcaggttatgtggtttgattataagtctgtaaactgtgagctcattgatttctcttgcaaaggcaatgacctttttgcaagtctatcagttctcgaaaattctgtttgcttattttgctgatgacataatcatgtgcttcatactggtaaaaatgaaaaaaatagcacaaatagtaagcaaaaggcagagggtagcaatgtcctggaaggtagcagcctgagctttcagcattgtaaatactgggcaggaatgaactcagcaaagagcatttgcctagcatgaaaaggttcccaatttcattctcaaaactgcaaaaaaataattaatttaatgtacaaaataaccttattaaaatgagaatggttgcttagcatatgagaccatagattcaatccccggtaccacaaaacaatgaatgaatgatagtgaaagccaagtgtagtgtcatatgatcacaatgactcaagaagctaaggcagtattgttagttcaaggtcagccctggcccacaacataaacaatcaaagtatcacagaagatgactactaaaaagagattgttacagatactgttcttagattcttgcaactaaagacaccatcaccaaatatattggattaaaaaatttttaaagtgggctggagtgatggctcattggttaagagctcatactactcttggacctaagttccgttcccaggactcataccagctgcctcccaactgtttgtaactctggctccagtggtcatatgcccctgactttcagagtgcatgtgtactcacattcacaaaaccccgtgtggagacatagacctacacatagtcagaacatattttttaaaaatctttaaaatggtcgggcggtggtggcgcacgcctttagtctcagcacttgggaggcagaggcaggcagatttctgagttccaggacagccagggatacacagagaaaccctgtctcgaaaaaataaaaaaagctttaaaatgtagctttaaataaaagatccctttctggcaactgggtcttgaaaccttcatgagaagctctggttggctaaggtgagtgggatcaacattgcgtctcctgggtgtgatgatggccttgtggttgtgtgggagtgtgtccttgttcgcactgagaaaacccatgtgtttaggagtaagtgttgctctggagtggctcagaaaacagcaatatatggtattgagaacatgagggcagaggcagacacagcctaagtgagagcagagcacagccagccaagctccacctgccggggcagcaacaggtgggcacacatgtgcttactgtaaaataagaatgtatgagagtggtaagatggcaatctgtcctttgaaattgtaccatttaataaacagtgtatgctgtattcagaaaccgggacctcaaatttaggaaagcctggggatgtgtcatagctgtgtgatgctgggcaaattagctcacacctatgaaccgtttcctcctcggtacgttgagtttaacagtgcctgcttctgggttctgtaggctaaaagagagatttcgttggaaatcctcagcatggtatgcagtgggcacaaactttgagaatgaacacagtgagcattcatgtcctagctgcatgttgtgtagtgagaatctggaattttggtttctttaaaaaacacagaaatagtttaagaatatgctttcattttaatcccaggtgtagggatgtggggctgcttcggactgtctgcagcagctgactgtgatttgccctgtgctctagcagaggcatggttttgccagctgcagatggtttctgtgatggtgtgacatttgtaattgagggggatataatgccagagccccaagacgggattggtggttggtggtcattcgggggtggttgtggtttgatagtagtcgtgctcaaagaagaaacaaaagaaaagaaattagattccggaatatctatttctctctccactctatccttctttctctcctagctagtgatggggtgaaatggggcagggagtgggaaaaatgggaaaaattaacaacccacaaagtagcaaagaccagatacaatgctgagaactgaaataagttctttgctctctagaagagcctctagaaggggtctgagaaagcatggtgtcatgagtgtacctgtcaaaggcacacactggacaatggcaaagccatacaggcttgttaggtagatgttccaggaacgagggtgcctgctgatttgaacagaaccaccgagaccatagtggggagcccaggtcagtcccccaggctgcagccctagagaagtcctttattcagtgtcagaccaaagtaatgacattgctagcatgagacccaagaggaatgtgtacatggcagccaggggactgtggtttagtggctcttatgcccatcctccctggcctactcctgcttgttaaagaaagcacaacccactcaggctctcttttggcaaagcaccctaatgggtatccctgcctctcacccagcacaacagatagacttgaattgttcctgagccttcccctccagtcccataatcagccttgcagctggaccctttaccttcccaacaggcctctgcacctcttccctacccaagtcatgtgacactggatgcaagctttctctgtgcctcccctgcctgtgttgtgacatgtctaaatctacctgacagtatgctgtgtggggctgactgcccatctctgctctgctcctgactcagcatctagccccactccttaagcacatcctgcttagttggtgtctcttggggccatgcacagcacctgtcacacagcaggctctcagaaaggcttgtacagcacctgtcacacagtaggctctcaggcttgcaggattgtgccaactcaggctttagcagcaatttagattatgtagaagcatgagagtgtcattaacatgacaatggcatctccaaaggttgtctcatttggagccaatagatggcaagttacagactgacatttggtcctagctgtatacagtatagaacagcaggttcctagctgacacacatcccagtctagtgaaatatctcaagaatcttacaccatccatgatagtttctttaaaatgtcaattctttctattttagcagttgagtggccccaaaccagtttgcttttctgaatcaatatttttctctttctactctctctctctttcattcctcttttaactacgctccattcttccccctttccttcatttttaccatgctttgaaactgaacctctgaactgggtagatcaggggaaggaaaacagatttgaatgaaatcttcctctgaggaagtggcgacccaggattagcgccattccattcccctctctatgaattaggcttctcctctttatacttgatgaataatgttgctggctgcttttcagaaatgaagtcgaaatatggagaaatgaaatttgtatcttataaactgactggaaatgtgattataatacagctgtcagttttgttcaagtggaaaatttctaagtaaatccaattgcagcattatttggttcttttaaaacagggtgatgtagctgtttcctgcgtattgattatttgattggtacctgtctgctggacctttttttctctcagtagcactcattgatgtggtttaatgtatattcctgtaatctttccctgttttataaacttacaatcataattgagctacattagagagacatgttctgctgagatcacaaggtcgcctaacgactgtgccctctctggttggctttgggttgaagtggacctaggacagttctgatcgagacaaaagctaggaggcttcaggctttccagacaacagcctgtgcatgggaggaggcactgcctcagggaactggcttcaggattctgctctactttctctataaaatcattgtttctacagaaggcactctgcagcttgaagctgttttccaaaaccctatctgtcctgtgcatttgaacatgagccacaactggcctctcaggagggaagatgcccaaagaagcatggtttctgaagcccttgggagctgtgtaggttctggacacttgcctgccatggcatcctaaggcatatcccatgatctttccacctcaggctcctgtggctcagctcctgtggaggctgtgcagagggtaatatgttgcctgtcaggacttagcagtcctgacctggcctcattgagcccagtccataggcatcagccaagacacactcagacttggcaggtcagaaagctggcttcagctctttctaaaacccatctccccataatgccctttggtggctcaccttatttagactaaaatccctgagtagcctcacctcctctctgtctctcatctccactccagttcggctattccgtgatatcctagtgtctgaccctccttactgcccacagctcctccacaattcctgggactcagagcacaagccttggaggagcagctcctttgcctctccacagcagatatcagacgcttctgtactcactggcttcctggcttggagtcttaatctgcacttgtagcacactgccctttataatgctgcctagacatccacacttctgtgatctggcccttgagccacacactgccttgtgttactgaccactgaagtcatcctccttgacaccatttggctgacaggagaaagaaacagtagggagagctaccataggaaataggaatctataggaaaccctggttgcaggttagtgttgagtttcaagacatctctgcccctggcctgctcagtgatgctctctggggctatgcccacacaggactctagaccctgtggctccctctgcccactctgtggcctacctcccccatctggcccaacaagagatggatcacacaaggtctagtgactaccccttgcctcaggaaggaggactggcttctggtcctgatatctcatcgaccacagaacacccaaaaataaatctctggggatactgaaacagcaacacatatcgtgacctttaagtccagagagtgctgcctccacatgcctcaccgtccccagcatctagcttgctgactgcccaccccaccccacccccatctgcttttcgcctgtcttcattctcctagcccactgcagccccactgggaagagtggattggaggaatcagactgctccctcctcctatgttcttcttagaagctggcttctatttagattaggcaaagtacttagaagtgttttcctccaggatcctaaatacataccaagtgtgggggcggcacactaggataccataaaatagctattagaatctctgttaaagagcaaagggctatacagagaaaccctgtctcaaaaaaccaaaaaaaaaaaaaaaaaaaagagcaaagaatggttgcccctcacaagacttaaagactcccaggtgaggctctctgttgtctcagtcaccagtgtaacatgtagcaaacacagtagatagtcaccaagttttcaagagaatgtcaaatgtttcttgctctactgtttttaagaagtatctacagaactggagctcaggtggtaagatgtctagcgagcacaaagatatcctcttgcctctcctgagtgttcccattcagtgctcagggccacttccaggaagagaaacccatgctgcacccaacagctttctctgagtgtaccctcagaacttgggacagggagacaggacgatcacgacatgaaaccatgtctgagaatggagagcaagagaaatatacaaaatactgaacttggaatacttcaatgcttaaattgtcatttctacttttatttgcctggaaatagaagtgacttggtttctcacagtaccctagtgtgcagagctgctgtggagcatggagtccacccctgacctgtcagctagggcaaggcagatggagggaggctagcagttctgagttagccagagctggggccatcagctctaagttcagagctctctggagccaagcctgacatctgaatgccttctagaggatcccattgcagaaccaggattgggaaccatggtattaggtaaagtgaggaaggttctagaactcggcacttagtcttcactactctctgtgaattccacttccctctggaagctctcctttacccacttgacaaccagccaaatgtcagcagagaagtgactctgggcatgaagcagcagctgtgtctgtctagctcctgaaactggcttccatggtgaggaagatactctgtctaactcctcattgtttgatggatctcaatgaggttgacagtcctaaccacaggactgcagtagtccctgtccctaagtactctgcagaggagggggcgggctttcgtggtagctgcagcatggctttcttttcctggaagaagctctgagcactcaggagaggcaagagaaggcatgcttccactgtccagctgctctaatttggtgtggacagctagccagtcctgtaacagtcagtcattcccttctctcacccccgttgtgactgcttgtgtgcacttgggtttgtgtaaagtaaccacacagcttgcctgtcatgatcaagcccactaacctcaccagaagcctcaaatgccctttctgacagaaaagagttttagagatgggttaatcccttttccccaagcttcctgctcagacccctggtcccatatgtgagcccttagccaatgctgaacccagagagctctgcagcccccgtacctgagtcctcaggcaagctatgctttgccttgataaaaatcacttgacctggttccacatgaggttccttcacagccgtctgcagcaaggaaaccccagcctgcccctaacccatctgcctcctgaaccagtgccagtcctgaaagcagcctgctcagtttcaaacacagccatgaaaatgctccaggagctaacagactctccaggccagagtccgacaatcagaccaggggagattcaacaattggaagacctgagctggcctctcctggttctcacagcttgtccaaatcatttgcttataattaagaattaaaagttcccctcccctctttcagtctaccacctagtttctccttggagacgaccattttgtatcccagttagacaaacctttcttcccctccctgacaaaccttcaggcaaagcacacacccacgattccctggatcttcatcttgatacatccaagctagctcctgcatccatctttttttcattgccagagccagccctttgcattttataatatgctttgcatttttctaaatgcagccggggttttccagagctgtgcaaagccaggaaataaagcatgtcatttaaatgactcctgttaacctttagcctttaggtggcttctcataaaactcacttctctcccagctctgctttgcattctccagtgcagggagcctggtgaagagcctacagctttctctgtctgctgcttcccttggcatcttcctcctctgatcccctacactgtacgctcacagaagtcagaggcagaaatgtgagcctcaagaagtacacagcaggagattttgagctagatttacatggccctattgctggtatttcctgaggtctcccagttccctggcttcagctgcttcctttcctatcatcttgctgtctgaaacagtaatggtcacaaaaagcacatagtgacattttcttagggccactgctagcaatgtttcagacagtttaatgccatgaaccctcacaagctggccaagtaattcctgttatcctcaccttttacaggtgattatgctaaaacagaggagctcaaggtttaatagtctgctcaatcagcacagcgcttggactctgagctctggactaggacacacccacccccatcccctgctcatgcactgaagagccactcactcacccatcattggctaagagtagctcagcccaaccctcctgtaggcagctggtggtatccagcaaggataccacagacaggtttggatgctccaataaagatgggaaatggtgaattcagcttttgccagggaagggaacaagaactgattaagaacctgaattgttgagcccagtgtgggtactctatcaaatttatgcaaaattgggtgctctgaggtgccaagaacagtgtgggcctcactaggcttaaatcctaccatggttcctttttatgtgagctctaggagagaacctaacctctttgcttgcctacatcctagagtctatgactcctgtcttctctgccttctgccttgatcttctactcttaaggatttcttctaattatattggacctactttagcaatcccaaaagtttttaagttaatcacacttgtgaagtcccacttgaagattccccattctcaagttccagaaaatagaacatgggcatctttaggattcaactggaatatggaaactggcagctttcaaggctaaaaaggatggcatgggctctctgttacatcctacaacaaaggagcccctgagaatggatggcagataaacaaacaagtatagttagctaggagatgctctggggtcatatgactttgactccagctcaaccaggtctttggcagatgaatccttccttacaggactgagacctttccagcaggctcttgggtctcagaaacagtaagagcctttggtctagactcctctgttttgaatttccagttacaagttttctcttagctccttccctcccacccctcaccccccactgtactctctgggagtctttgtccttcctcagtcttagccacacaggccctcccctcacccccaccccccaccccgcctttttgtctgtctttgtcaccctgccttggtccccactgctcagatgcttcctgtgtccagagctctttcaggcagctcctctcacttttcccaaaacccacttacctttttgccctaaaaggctgaagtcttagcttcatggctgtcagccctccgagcccagactgctcagatctccagctacagggctggccaccacttttcttctcatgtcctcagatctagtccagccatcttgagccagagctcagtgggactttggaagctgaaatgaggcaggaagaattttaaccaaagctcaagttgggttttgaaaggggcctttatccaggaaaggattagagttccagtcattcatgggtctgttgctgactcaagtggtcaggatttaaaatgaaatcaaacctggcagggcattttggtttttatttctcaagaaatgagaacattgttgaccattataaagattctgattcaggccttaagtgtatgtatacaaatggaaaatttaccaagctttataaacatgcccctcaattttgacagcttttgttttgttttgttttgttttgttttgttttgttttaagatccatgcttactttagacacttagaaactggcctttgagtgaatgtaagcttgcaagcgcagctatgtgtgcgcacttacacgtgcagagtcagtaatttgcttagtaaaaacccatagatggggctgggaaggggttcagtaggtaaagtgctatgcaccgtgaggttctgagtttgaatccccagcaccaatgtaaacaagcaagcacagtggtgcatgcctacagtcccagttctggggaggggaggcaggatgatgctcgggacttaccatgtgtctgcatacatacacacaaacccagactcacttgctagtggttactctactatgtaggaccaggtgggaacacctagagggctgccccttcccaggaaacccaagtccagcagttcacttttcttcctgctgtgaagaaagtatatttctcttgaaaacaagtgccagtctgccctcaacactagaccagagtgcatttatgtttaaaatctgagggtttgggaggggagggggtagcaaaagtatagctcagtggtagagtgtatacttcacatgcagaagtcctagctcagcccctagtaccaaaacaaacggggaaaatacttgggaattaaaagtaagacttgatgaggcccagtcccagtgggtgtgttgctgaactgggaatgaggtgtgtgcaagtgcagccaagggttctggggatagaggcaagcaggccagcttctgcaccagctccctatagcctcctcttcctgtagacagatggaggagctttctccacagagcagagtcagtagtgaccagagcggcagtctctcctgtcacaactacaaaggtccaagtgacatatttggtgaatccatattctagttttgctttttggttgtatgcaagattatatttagcactgcagattgtcacaggtagaattgaatccccacctagttagagagaaactcagggatacagccaagctggagctcttcctccagcagaacatttaatttgggcttccaaccccagccctgcaatagcaagccccgtgctaaagcctgtcagaggctcagctggtcagtgcatgaagagggacaatgagagctgccctttacctacagctcagctgagcccaggcttatcagaccttgatcttattgcctctcattccatccctgcattcagagccattgtccactctggagccttattcctccccaacacaagtagccaaatgtctgcttaaaatgggactagagccctagaataacctacctgcctcagtcctttctcctgagcaggccaacctcttctcccagagagagagagagagagagagagagnnnnnnnnnnnnnnnnnnnnaaggaggagaaggaagagaggggaggagaggggaggaggagagggagagggagagagagggagagagccaaggaagctgtcagggctgtcttgtggagagaagatggtgggggccagacacacaaaccctgcctctgttggcagtcactgccaacctcaagcctcccttgctgtgaacccatacttgttagcaaggtaaagaaggcctaagcctggccagggatctgtgcatagctgactccctgacctctccaagtctgtgtagtctggtcatttcccagcaagaccttttctgattaccagactctagttctcagcatcctcacatgcatacacttctctgtttcggggtccctgtttgtttggctaaccgtacttggaggcagaaaccctgactcttgtccacagttgaatccctgccagtaaagtaggtaaatgaataaaaatgagaaagggcattaaggtctgagcctgtaaaatgaaacatcagccttatttcagaaaagggaccccaaaggcatgcctggggacctggccattctgacccacatttgacataatagccacttgggttggccttgttcttcactgagcacttggaatgactccaaaactggagttaagggcccacactactcttgttcactcactggctgtgtgagtcatctctgcagctacagcaggcagtctgaaatgctaaagatcaaccctggctccaggtgggcttggagtcaatcactggcctccacctgatgccccagtcaccccctcagcaagtgtgccctcagctggtaccccagtagatactgctgaggaagaaatggctgagctgagtcacagttacctaatctggaggaaaagtaatgcattgttagcaatcctgaaagcagttaaggtccgtggccagatggctgtgcatcttccagaataagccatgattaggggcctccccttggcataaatcagcaggctcatgcagggagagtaggggcctttttcagggcttgggaaaggagctagctcccagattctccttccacaaagttctgtcatcctctaaaggtcttagataaccttctcaaccatctatagttggggccacaaaccgtgtcctaggacgatgatggaagggacttttaaatccagaatgtcagagaacactatggcagcccattttctctccatgagccttaattggatggtcaggataggcacatatatggtttgtctaaaccaaggtgggatggttttcctgagagcaaaggaagaagctagattcaggttgggccacatcctggaaatcacagacatacccagctagctcctggtctctccagtcaccctgcatcttggccaccctcatctttttcagcaagtgttcagtaaggataacagaatgccatgatacagcagaagaccctcagaggattggcagctaaggcttatggggtatttagaacagtgtcacatttgataagctcctggcaggggatggtctgcagctaagagcagcctcatttgttggatcataagttgccttgtcacgaggtgtgtgtaactctgctctcaagtgccatatgtcatgcttgtgggatcaggctggatctggctgtcatgcctgttaaacctgaactctccatggctttacccagcagacttcctgcttcctatcttgtcccacatggcaagaaggagctttgctcaccctgtcactcacgggtgtatctggtaaagactctcctgctgtgcctgtggctacaggacctgcacatgtccagtggattctagttctttgtgcttcgggtccagaacacatactctccctgtcccagtggctttaccaactgtcaagacttgggaaggtgcctggatggtgattctgagcctgttttccaggatcctcttagttctgctctagccccaccccaaaacatgaagaaatccaaggagcagacactatagctgaaaggaaggggagagtgcagtgtgcatggccttgcctggtttcagggcatcacacaaatcctggccaggcctgtttggccagggcagaggttgatttgcaaatgtttcatgtccctaaaccatgtgctgttgacacattagggcaaagcccagaaatcattcttaagttttggaatttctggcctccctgtctctacctcagcaatttcagaaaattgagaagctggagaggcagggatgtgaactataggctatagattcaggtggggctgcgagctcagccagagttttaggtacggtgacccaggtgccctctgccactgtagtctttatacccatggcaagtggcctgctgtatctcaggcttccagacctctgggaagtagcagttgcttcccaaggagcccatgaagctaggctgagtgataaagtgaagcccagtgcagaaagtacagcaccgggtatggaaagtgagttactgctcttgcaggtgggcctgcctttggtgatatttacacccaagaagcttagatggcctttggctctgggatgttcacataagctccaaagccaagcacatggcctgaagagcagccccttgctcgtgcttaggataagctctttccacaacatgggcaagtgacctaacctggtgtgttgctttctgctaactagagcatcattgtgaagatccaccaagacagtccatggtgtctgacccatgccctcactgtagtacaggccggggatacgaactcataggcagtttccctttaaagacagctaccatgtgaaggttcaggtagtggtggctagagccaagtcttttcactcactatctagaagagatcctccaggctctgccttttcaggcctgtatctgtgaactcagtgttgcctcttgctttcctgattcacacacttcacacacctgggtaccagggagcaccacaggaggccttagaacccacctttgaggtgtctgtcatgtccgagaaccactgcatcatgctcattgtgtgtttaatacttttctcagtttttcctcctccctcagcctaagataggcaggttagcccatcctaaactatgccagtgacattgtgggatccatagctcataaaatctgaagtccttcacaattgtaccatcttgtaccactactggtgctagcgggcacttgaggtgcgtgtgcttgctaggccatctcagggcccctgccagctcacatggcccagcaggaatgcttatcatatggcaggaggaggatgagatggtcttaagaacatttaatatgcagtaccgtcactttgttttatgaactgagtctaaatgagttgattcttgtggcctgtagatgtaagtatggacagagttggcttaatgggccatgcatctagcacgtccattgtttaagcctcatgtatctcaactgtgtagcacatagacactgccctgctttaagtttcagaccaaaggcaacatccttcccaaccttcctgtatttgagaagcagctggtgggttagactaggagattcaaggctctgaaaggttgcatgcacagctcaaaggtatactagttgctgctagtctgccctctacagctaaggcagggagaagttggcagagagctaaagattacctccctcctcaataaccctgccatccttatgacaagactctgctctaggtgcatcagataccccttggccagaaatgaaagccagagggttctgcttcagtatacaggctgatgttctgggtccagactctaggacccacttatagctgaaggcaggaaacgcaaaacacctctgcacccagagagtgctacctggagagggtcacagcttctccactgcacctgacatcctggaaggggaagacaggcagttcagtataattgaatttttgtgttctgttaggtgtagcctcaggcctgagagtacccatagccccgagccatgggctcctccacagtgcactttgctgctagtctgtcctctacaccctcttctcaaagagtagaaatgatcccgatcaatacccactgacagtggctggacagctggctcactccacctcagccctgtatttacactaggatagaagcccatcctggtgctgggaattggaacgctcttccacgccttctctttgctgtatacatgtttgcctagcaaataatagctgaacatacttcctttgtaaaagactaaaaccacgcatagtctgctaaaaggtgaatgtcatcttcctctcctgcccagtgcctcacccaggctagcctggggcatgcggctcttgattccccgcccttgtatctgcacacactcacacctgtcttcccacagagcctggcctgcttgtatcacggttgtcaccccagccctgacatgggccttgctcttatttgctactcagtaaatattgacctactgaatggctgccatttttacacaactaggactgtattcatcgtgttctgcaatttagttttggcactttgaagtggggctttcctgtgtcaggaacatgggtggagcttattgtacttgactgcattcagtggaagtgcccagtgtatgatgtccattgtgcaagtaccatgagcacgggcattgtactgcatctggttactcagtgtctcagaggacctggagcgtgagtgtgagccctgtcggcagctgtattccagcctggtgctttactggaagggacttaccactgtgcaattgctgggctgagttagagctagtagggaccttaatgatagctcatatcttgaaaaactggccatctttgccacctgtgtgacagaaaaacagcttccatccaagagtcctcaacttgaagcccttgtcaagggtcaggaggtggcccagagaaggctcctagctcagagaatggagttggttagaaggccaagacgactgtcagggagcaggattcagcctgccaggccccccctccaagccagtcggcccatcagagaggtgccagggaagacttcctgcagctggaatttctgcatccatcactcctgtgtccaggccacacagctgcagtcactcagattccggccatccttcacactcagaattgctgtttagacattcccagccctccactctgtcggtgtttattttaaaatcatccagaaacatgcttgcaatgttagttagctctgtcaaactctccattgcatcaggcagtagtacgtcatgtgcatgggcccaggtcctcagaagactcacttgaggaggacctgcctcagaggaatgcgcttcagaagccctttgaaagtcatggctgagggaaagcagtttgctgtgtttgtgggttctctgaatcagctcaggggccactcagagaagggatgacaggcaagcaaaccacagtcttctgtgacaaatgtcctcaggcagcaaaatgtgatgttgacaggcacgggtactgctgcggagcccaggctccaccatggaccattcattgctacacgtcttccagtaatccctctccccagcccccagagcaactgcagccctggtgcagtgcgcttttaaagcaccccacctcctctctctgtaaagccctgaggcaagcagttttcccctctgtttatatctaccacacacacactgtgagctgcttctattaaaagcagtcagagattgataacgggtgttaagaaggatgtcacttatttcacagggtgaaagggaagttgctgtggctttcagtaaaagctcacagacctaggccgtggcagcatgctaaccactggggggcagtggagctgtgtgcccccagcagcttccttccctggcactccttgagtcttaggactcctcaccttagaggacagggaagggcaccaagaaggaggcagatggaaaggtagggatgagggttctctctataatgtgaccaccagctcagggatatgaggacacatcctcagcctgaccttggggtcccttcattggaaaatgggaaagcttcatgcactatacgcctgaggcacagcaggcctctgagaggtgttgccagctgagactggatggaggtctgagttctccttctgaatcaccccacttttcttcacaggccaggggtgctcactaactgagctgagcagaggtctccgataccannnnnnnnnnnnnnnnnnnnttatttcggcatgggcttccctaccagctggcactccctctctgtttgggcctaacggtcaggagccctccatatccaggaactatcagctcttcgaaaagcatattcatctcatcccctggcgagcaaggttcccaaggttttcctaaaagtcattttggaaatgcagatttgagcacagttgacttcagttcctggcacttcaacccttccttcacacctctctggttcttggcatcatggtgagagcagaagtatggagctggagtccgttagagtctgagtaccaaggctttgtgtgaccctgggtgtctctctgaaactgtgagcctcagttgctacatgtacaaaacaaaatgcttgtagaaactaaacggtccataatataaccctgggtgcatggcagctgttatgctaactgctgcatcatggagtccttagcaggggaagagtcaggatatcggaagttccccaccttgccctgtccggcacagaggtccctatgaaccatcttcaattgggccttcccttcggtcccatccttgagttccctgctgagcatcagtctcctcttcctcttcatcccttcacagcctttgctagcccagattagacctgctcattacagcagtgaggagaagagaacaaaggggaacacagggtagaaaccaggagtagggagacgccccacttcagctgaaccaagttacacaggcacacctgtctgctgccgtcctgtcagctgctcagggggacaattcacacagcggtgcctgccaccagcagcctaaggagttctgctcaggcaaaccaaacccttgactatgccacaaaaaggacctgcagcagagttattaagacagggagaaggcatacttaaatgctgtgggggaagggagtttgacatccaaggcacaggcacaggccttttgaaagtcatacttggatgtatttacaatggacacaaaaggacatggctttttaggttacattgttccaagggtgtaatttacaacactgtttcaaggaaaaaaacctggaaagtagacctttaaaaccatgtaaagatcgcatataagccagtcatttgtcttagtgtaaagatccctctggaagtgagatgtgtgaggggtgaggacagtgaacagagttaaactcaaggccacaagcagcctgccctaagtgagcaagctaggtttcactaatgtcctcctagcagtgtctttaggaagacagacaccaactctgtaggcttttgaacggacgccttccccttcccaggtcccctgaatttcctatcttcctctacagcctcacagtgagcctggctaacacattctggcaggctagagggcatgcctgactagtaacagtgctttgggtttggttctgttatcattgtctagttagttagttagttagttagttagttagtacataatagcactatgtgcccaggctggcctccaattctgtatctttttgataagtgatggatgcacaggtctgtgtggccatgcctgatttgcatatgtaccagtgtttttctcccctgcttcctttttggaagtgaacaatgacaaagtcctttctgtcatatctaaatgtcttttgaaaaaaatcagtacttctgcaccaggcaggacacatatctacacaaacagcaaaaagaacatggcaggatagagtggagaccctctgaaggcaaaaatccccatgcctccagctgctccagaaaggccattgccacagccaagccaggtgatgggtaagagaagcagtggcttgtgggacacacttttcctgctggactgggatctgacggtaacagtgacaggagaagtggtgaggtgcctttgggtgaaggctccactgtgcccacctggggaatatgacaattggcttctttttcatgtgtgaaagcctctatagtgagtagggctacccacgcgtctcagcagtcccccatctcagcttttctatgacctcttgctagctctgcagggcttgcagccccctccatcttttttgttcggtttttgtttttgttttttgagacagggtttctctgtgtagcccaggctgtcctggaactcactctgtagaccaggctggcctcgaactcagaaatccgcctacctctgccttctaagtgctgggattaaaggtgtgtgccaccactgcctggcttcacatccatcttaatgacccaccttgctgtgccaggagatgcaagctcagggctcagagggaaacagaggtggcgtgagtcagggcttccagaggccagacccagaaaccctcttacccatggcagggaggcccagccttcgagaagtttccaggcctgcactgtgattacagtaagcagtctggaggcagtgtctgctctaaccccaggtgcacagctgtgggaggagacagctgggctcgtggcctaacgggtcgggtctcgttggctccagctgctctgaagtacaggccttgcagacctgcctcgcccacaccatgcagttcccttcttaagaactgacctcatgtggcccttttgcatgtctgttctttaggaaagaaaccgttacatttttctcattaggggccttgtagacctgctgggcactctctgtccaaactgtacacacacatcaccctacccttctcctatttccgctatacagttaatactgtaactcaaatgtgaaaaataagctttgcatggtggccatgaattttacatgaatcacattgaaatcaataaagtctgtagaatgaagcaagttattgttataaggaagaagtgggagctgacttaaaggagccgtggccctcaaagtacataatggaaaaagttgtccagcagtgatgagcccagtacagcctttaacctttgatagttcttggctccctcagaactggggatgtctttgaaggtatctactttcttctggggaggtgtgaggaagcacaaagtcacattttccatgacttgtttcttctttgaacccttgctaatctttttttttttttaagtgggtaaatctttgaaatgacactgtttcaagtttgggatctttgctgtaagtggcaggaaaggtgggcggtaatgttatggaaggtggaaagcctgccttttctaggtcatgtttcaagtacggagaagtcagacaggaaaggtcacacaagaaacaagacaggggctagagctgagctagcatgcttagagccccgagctccatcccctgctccacttaagccaagcatgtcagcaatccctgtaagcccagtacactgagaggcgaaggcaggaacgtcagttcaaggtcatcctctgggatgccggaagttcaaggccagccttggctccaggagatcctgtctcagaaatggtgttagggatcaagcttttaaggctttaaccccagactagccacatggtgcatgtcctgtctctaactccaggccctagactctctgatgagtccagcttggcacttctgtccaggccaacttgttccactcagatagcccagctgtgtgcagggcataggctgtccaagggaggcaagctgagcaattggctcagctcacagctctgccacagctttctgggccactgaaaaaaagagaagagctacaaacaggttagtggtgtggccatcaccagagctttgctatgggagtcactcacacagataccctggacatactttatcctcccaggaaaaccaagctaggtagttcctcccctcctccctcctcccccccccccctcaccatgtcacagctggccacacgccctcaccatgtcacagctggcttgtcttctctcagaccctagaccaagaaggacactgtcctatgggagaaatcagggccactggcacttttccaaatgaaagtagtcatcaattcactgtagaaaacaagaagaaagagagcagtactttttaaagagatatgtgtaaccatgccacaacctaaaagctcccagcagcttgcctccccttggtgcttgctgttctctaacctccattgttcccctcagctctgcgcaggcccactctgacctggcctcctgccctgccatactttgcacagcgtgaaacctgaggcagggtctgttggcacatataggaaatattttgcctctgccgagttacgtcttgtgttgacaaatgacgatggagatgatgtttttacatttatgtaaatagtacaaatgtccttttacaatgattcaagtcaaatggagagatggctcaggagttaatagcttctgctgctcttccagaggacctgagttcagtttgcagaacctacatcagactgttcacaaccacatatagctctagccttcatgggatctgttgtggccgccacgggtacgtgtattcacaatgacgcagacacgtgtacctggcatcagtcacatagacagacagacagacagacacacacacatttaaaaaaaaatcaactagtgaaagtagggatgtaactgagggagaatagtgagtgaatggcacaactatggcagtactgtttcaggccctttgttttctttatggacagcatctcactttgcagccccttctggcctggaactctccatgtagcccaggctggccttgaactcacagagtacacctaagtactgagattaaaggtgtatagtaccacacccagtatttatttgctttgtgtgtatatgtcttcttggatgtatgtatgtgcaccatgtgggtgcaatgcctgcagagggtgtcaagccccctggaactggaattacaagcagttgtgagcagtctgacgtcagtgctaggaatcagattcgtgactcttaactgctgagctattgcttctccggccccttcatttttcaaaaacagactataaagttaaggatgtgtcttagtggtagagcttgtcagcatttgagaggacttgggttcaatcccctcgtattgcaaaacaaacaaacaaaccccagctctgtagtgttctgatgagaggctctggtatgctttcccctttagctgtaagttcttcctcattgaaccccttcctgagcatggaccttcttgggtcctctctgtaccatctgtgagtatgtctctagcatgtaattctgcagtgggcttggggctcaaggacaagcacagctggaaggcctcccttatactggacagcagtgtgttgccagtagctgggagagtcactagaaggcagttttctaattttttagcagtgggtgaatgcttctctctcttatcaactgccttctctataaaatgtactgagcccctcatccttggcaggttccacatggtctttccctatgtgctcagggcctctataagtgccttttaatatttccagtgtgtgtgttaacctttcatttaaatttgatgtatcagaaatatttttaaaggcttagcttaattaatttctttccctgacctgttattttatatctttctttacctaaagcattaatgccaaagagcactgacttgtaggactgagttcaagactgttacaattaacttctgggatgaggatgccccagtggtccatcagcccagcatggcgcactgcctccctgttcactggtgttgtcggtgagctcctccaaagccacattctggctgttgagtgtcctaggacagaaggagaaacagatcctgttactaaaactgaaattagtaaaaacaaaggcagaattcaaatcctattccttggttatgttagccacattcaagtccttatgtagtcacgtgagactacccaatagtgggaaagcagttcttaggtttttgtatacacttaatctagagtgtgtatgagtgcatgtgtggtgtatagtgtgtgtgtgtgtatcagaggacaacttgtgagaatccttccttcctctgcgtgggttccagagattattcttaggttgtcaggcttggcagcaagcatccttacctactgaaccatcttgctggctggcccttggaagtgcattttaaatttaatgttaattcattcaaattgaaatggacacgcaggctaggaccttttatactagcaggcccagttgttgggcatttctttctgcacagaaagccttactgggcagcatagcctagaaatgggttttgaccaggaaaagagagacacggggttaggaatcttgccgaatcccagctcctccttcaataaagggtgagccctgtgttcacccttgctgagccctagtgtcctgccctggtaccaggacaaggatgcagacttctcacaaccactgtgagtggctgaagtgggagctgcatagcaggcactgggcactggccttctgccacattattcctccctgtgcctgagtggaaggtggcaggtagaggcccagagctgcactctgtctaagccaccagcctgtggcaggaagccccagaccttggagacttgattcttatctagccagttacatctagggctcagttaggcaggacttccctaagctaagcaaacaggtcctgcccccctgccagctgtatccctcatgggtgtccatcactatctaacttagattgcctgcctggggacttcttgacttgctcttttcattgcctagcaaatccaagtctatgacatcctaactccataagcctgcttccaggcagcaagctggaaaatctctcgtggactagggtggggtggggctcaatgctgctatagaccttcaggggctttggcagcatggaggccaggcttgcaacccattgtcccctcccaatgtcgtacccaggttttttgcttatctttatcctaacttttttctccctggtggaatatttccactaccatgaactttgtgaaattaatagtcatgcagcttagccaaattgatatgacccagctcttttgcaggcagctgatcttagtacagtcacatgtcctttttcagggtcttccagattcatctgacttagtgtgacccacaaagtctttcaggattagggtttgacagtttgattaggtacatgtggaggagcttgtcctgaactcactgtgggtatttccagctagggtcctggaaccatcccttctgaagaaccatgccttctgcagcagcagcagcagcagctcaggcagctcaggcagctcaggcagctcgggcagctgctgctcggtcctgtcactgccctgctttctcataagcaaggctcaggtgattacacttctgcttggatagcttccttccaatgcttagcacagagtcagtgcctattaaataccttatgcccatagcatttgaaatgaatggtctacctttgcaaaggaacagaatttttggaagtggtctgtttgcatagtgtgcaagggccttttaaagaatctaagcaggctaagctaagtggtgcctctagttgtgctgcttaatcttcctaatttcctctacctcctgccgtgggagcagtctgtacccagcagactgtgggttcgagagagcaggaattcattttacctttgcatccccaatgcctggtccatagcagacacccagtaaatatttgattgatcggtcggttgattgattgattgattgattgaggaatgggtgagaaatcctgaggggtttttgttgttgttgttgttttcttttttaaccttaagtaaacctttttcacatgtaagtcctaatctgggtcttaattataaatttaaattcaaggccagaatgcccaaatgcctgtagttaccttaatgacttttcctagtcggtacttcctgggcatttgtttatgttccttaatgtggctttaataagctaccctgactggcaggtccctgtgatctacaaccttagcccctacccacccatatataccaggcccactaaagacaagtttcccagccctgccttgttttctcctggctgtagcccatgacacacaacctctccaggctgaccttgacacgttcacactgagagcctcagcctacagagaccttgatagccctgcctttcacagtcacaccctgtgactccttccttctcctccctcctggcctgtgagagcagggaatctgcagtcactctgccccaccagtgccttgtccaaagcaggcaccccttcttgacagggtgtttatgagaacacactgtgcacgtgtgtcatgaacaaaatctccctttgttagtattttaaatggtaattgttgtacatgccacagcagggttttggagggcacaagacaactttgtagagtcggctcaatcctctcaccttcacgtgtgtttggggatcacactgaggtcatcaggcgtttgtggccaatgcctttttccactgagccatctcactgactcccaatgttttatttactttttatacatgtgtgtatgcatgtatgctgtagtgtgtgagtggacacatgcggaccatggtgcacatgaggttagtacaccatggaggaaaatcctcgcctcccaccttgtttaattcagtcttttattgttcaccactgggctggtgctgggagcttccaaggattctccttgtatgagtagcagggttacagacatatgctatagcatctgatttttatacttgcacactgagccatcttttttttttccattttgcattttgctttttggtgttttaaaacagggtctctctgtgtagccctgactgtcctggaactcgatctgtagactaggctagccttgaactcacagaggcctgcctgcctctatctcccaagtacagaaattacaggcatgcgccacctctaggcttcacttgcttctaaagtgcatttgtctactatatgtgagagagagaagtagaagggttaggggacagctaatgaaaaccagatctcagcttcaccttgttgacacagtctctcttgtttcctgccactgcaatgggctccagcgcaccctgctgcctctgcctcccaactccctttaggtgtgctggggttacagaagcatgctgccatgtcttgccttctgcataggttcctgaggttggactcagcttatcagggtctcacagcaaacactttgagccattttcttatcccctatttatctagttatatatgagacatggtcttgctaggtagcccaggatggcctccagctttcagttctcctgcctcagtctcctaaatattgggattacatgtcagtgtccccaattcagctaagagacaagtttgtcaaatagctaaagtgaaataaatgaattaataaagtttcctttcttgtttaattcaagtatatttatctttattttatgtgtataggtgtttcccctgaatatatgtctacacatcatgtgtgtgcattggctgtggaagtcagaagagggtactgcctcccttggaaatggagttacagataattattagccaccatgtgggtgctgggaaatgaacctgggtcctctgcaagaggagtcttaactgctgagctgcctctccagcctagcaagttcatttttaagagaaggaaaaatagttgagtgtgtcagtattgattatgtcggaggcagggtttaatgattgacaggtcatgtgactgggtatagtattgtactgaggaatgctgattaggttgggtttatattaaccataccagtctatatcacatactttaaaagtgctgctctggtgccagaaatttattggtagtcattgtgaataccagaaattgaaaatacaaagcaggaaatttggtttgtgaagtctgtagcttttgtttaagtccaaaggtgtggcctatctccaccagaggtctcccatattttactgttaatgtttgaagtatactggattcccacaagctaattaaaaatcagcctgctatgccggtaagcattcagtctgagaactaatttctgccaaacagccataaatgtgtcccctggtatgaaatttagacgttctttcccatcagaagataggcatgtggtttagtctaaacctcttaatttgagaaacaatgaaaccaactaaagcccacctagaaaggtcataccttgatggaagccacagagcctaagaggcagcacactgggctgctggcccagacccctcaatgtccctaccagaccgtcatgctcttgctgggtaagctcactgtcacctacctctgtgccaggcactgttctagctctttccatacttccctgagacctcattgcaacccaacaggcagatcctatgactgtctctccattccataaacccttttcctatgtacatttagaagaggaaatgggaaacagtttcttcaagaatcttccacacaggacaaaaggaagatgtatccccatgtgtccctttaggaatctgaggctcagacaggttacccagagctgggaagcaccttcctcacctagaaaatggagagtggatagagcctgaccacatcctcaggaaggctcagaactgagatctcagggtgcttctgaggggctctggtccaagcccctgtgaaaggctgttgggccaccaagcgtgacagcacagctcaggcattcagatcttttcttggaaatctggagtcttctcttcactacagagttaggtaactttatttactcatgctagggctgttttcaaagaggaaattatgcaatgtgctatgcaaatatgccattctgagagcagagcagagataagtgtggtcagcaggagaggatgagtctgtgtccctggtgacaggctgcatgcttcctgataaggggacacaccgtgctctacttggacctcgtttctggtaattgcattttcagcaagctgtctccctgtgaaattggtgctgtactcatgggaaaaacaaggaatgacaattgattccgagagcaccctgctctgtagacctgggcagttggtaggataggggatgctgccctgcttgcattcctggaaatgtgggaatgagaagggtaaagttctcattttatcctcttgaaaaaagtctctggcaactttccttgggggaaataaacacagatgggtttttcaggaactttgagaaacttgtttgcatatttgagtagacaaggcatgctaagtaaaaaaataaaaaaataaattaaaaaaaacaaaaaacaaaaaggaagacccacctctggaggaaggtacagctgagccagtccaaacctggacaccgggacaagctgcctgacatcattgttcctggggtattacagttacccatcccagggtagctgcccagggagcaaacaacagatacctatttgtacctgcagatttcgtactaactcattgttcatggtggtcctgaaacacttgtcataccaagttcctaaaggactaagaggtagtatccctactactcctgctagggcatcaaatgggtatttgtgatatgggcattttataagcatcagtcaaagtgacataaaagcccttactggtagagcacttgcctagcatacatgcagcctaaagtccattgccagcattgggaaaaaatgatagaagtgatggagggccatggagatggtttatcaattcaagtgcttgccatgaaagcattaggaccagtgttagggtccccacctccatataaaagctgttatccctgctgctgtccagcaagctggctcattagacaagctgaagcttagttttagcaagagaccttgccataatacaaaaggtgaagagtagtggagaaagatgcttgacatcagcttcatgtgcacgcagatatgtcttcatacatacaatcatacacctgccacacacaaggaaaaatattttctaagtgataggctgcagccgggcatggtggcgcacgcccttagtcccagcactcaggaggcagaggcaggtaggtggatttctgagttcaaggccagcctggtctacaaagtgaggtccaggacagccagggggatacagagaaaccctgcctcaaaaaacaaaacaacaaaacaaaaaaaaaaaaaaaaagaaaagaaaagaaaaagaagtgagagggctagggcgatggctccatggttaaaagtgagttctgctcttccagagaacctgagttccattcctagcacccactcctggcagctcacagctgcctgtgactccagctccaggggactccaacacttccggcctccagaggcagcagcactggtgtatacacacattcaactaaataaatctgatcatatggcacaggcactgtgtgttgaacaccttgggtcaaacatgctgctgtggcttgtttgcagattatctaggaagtcaactttaatccagtgggccatttggaaatcgttcaagcatgcatccaagttgaaagagtctacagtgaacaacacccgtgtaccacctacctgccaccactgactccattctttttaatcacctttctacttctctaccttcagtccccgagacctactggaaatacaattcatatgttaggcaagcactctgtcactaagctaaatcctaaaccagaaataattttataaaacttatttcaaagcaagtttgagaccatcatacacttctccttaaatactctagctctaagtaactggactaccccagtttcatcaacacagctggaagatgatggagcctaacacaaaccttcaggctgtaggccaggagcatacaaggtttgtgcttattcagggatgtgtccagtagcagagctctcataacagtacatgggccagcagttccgcagtgaacaggagtgagtgcaaaggaggcccaaggcagtagtgaggcagctgaagcagcagcaacagcagcccagggggttgctgtagaaaccttgaagccaagctccaagctcaatttcccttggttgactgtgcttcagcaaatagcttgctctcctttacaacctaaggaatacgagcagcacacgttgccccttactcacagagagaagtttgtagacccttttcatcacagagccagtgacttgctccatggctgccccttgttgtgctggaagcttcaaagaagacagagtaattgattgctacttgcagcaaatatcccttaagctgttgctggactgatggagaaatggttacttaattttcttcaaaggattgatttgactgtcaggggaagttctgggcctaagtgaatgtacccattcatctatcactgctgcctaaccatctgggtatcaggaactgtgccctcccccaccccactgtctccaactcacacagacaccctggtagcaatccttgggacttgacaggtctagttcctaccagactcttcttgttgacctgtagacttgctgggacctgggcagccttgtcactccagcctttctgagttccattaggaccagccaggcttccggtaaggggctcactgactcccacagaaacacagtgggaacaacttctgtccatctttttcattggagagtggattttctgtgctacaaaataccaactcccttataatgaggcagatccccagtgtcagatggaagatccaaggtgctgtcatggctcaaggtataagagtcccctagaggtaggacttcagcttacctcactaagctttgagtcctagcatctagaaaaaaacatcagaaggtcacacagttcaccctgcttcccagaagacgctgaggagtgaaatacaggcttggactagaagaactgctcccccagtgcagagggaacctaaccctgggcagcctcatagcacacggtagcttggattctcagccttcagggagactgttaagcgtttatgtccatttttggtcatttgtcacctagtgcagccagccagcaccccctgctagtccaggctgggggtgccccttctctgaaggaaacaaggcctctctggccgactccagggcctaggatcctaggcttcagtcagcttgcttaggcgagtgggatggttgggctgcatggcaccttgggctgagtaccttgatcatgtcctctgggtgtccttgaagaaagaagttatttaacttgaagttcagtttttgtttgttttcgtttttatgcagttcaggaatgtgtcaaagcagcagcttgaggcctggcatacaagggcttttgtcattagtggaagttcttgagacagaggtcttttttagactattttgcatgtgagctttagagaacattcataactgggaatggaccggtgtccccacaccagtgagcatcagtgaccctccatgtctttacctgccttgtgctgcccatagggccctgcagagaaattgagtctgcttagatggatgtgcaaaggagaccagacctaggctttagaatcagagaccttttggtgtgctaggatctaggaaggctagctaaggccctgcagtcttgcaattccagatgcctacttaaaagagtctcattaatgatgtgttctgaaaacgcatccaaattcctacatcttggagatgtacactatattgctactttgaaccccagtcttggcctgcaactaagggtatcagattgcagaattccagagtgtcctagaatcccactagcctagaaatcctgctggaaaggacttctttgattctaaatgtagccagagccaccaatgccaagaattaaattatgtactggcatccatattgtattaggaaagggtcatttaaatacagctaaagtcaatcagccccatttaccatttaccactctgtaacaagctacagcctgtcagaggagctggggaagaaagaggcagcccaggggctggggagagcagtgggttgagaatcccgggtctccagtgggaatactggtagacttgagtgtccctccatcccatctccaaatgccttttcagagtcagtcactgcctccattcatgatctcctgaaggggcaccagagaatccaacaagcaagggtctacatccttggggctaattcaacaaggatgaaggacatggaaatttcagaacaaaggtcattgaggttggttaagatgtgactggagatgggcacagaaaagactatgcctatatagtcgctgtcttcacaccagaagagggcatcagatcccattacagatggttgtgagccaccatatagttcctgggaattgaactcaagacctctggaagagcagtcagtgagtgctcttaaccagtgatccgtctcaccactggctgaactcttaactcttaactgaggatggccttgacttctggttctcctgcccaagtgctaagattctaggaacacaccactgcaccaagtttcatgcagtgctggagattgaaacgaggacttcctacatgctaggcaagccggctcaactgacccacatatccagccccttgaatctgtctttcttagtgggaaacctaagactcagtaggaggcaatttgccaggcgtgtcagtgttactgggcagcctctatggccctgagccccagtctctttctaataggccaggtggccctgaatttgtacttcatatgatggtgcctatgcttcccccccccctcacatatcttaaacttatattgggaaatggttgtgcttttcctgcatccgacttaaaaccataagacctgggcgtctgctcagtggaagaatgtttacctgttgtgtgtgaagccctgggtttggtcacctcctttagaattttaagtgggactgaatatagcacaaaattaaaataaaccactattccaattcttgttgagtaatgaaccttcttgtagcttaataatttaacacaatggcagtcattcgttttgcccatagctgcccatagtctgcccagggtccaatgggaatttcttacctctagtctacatggcatcagctagatgtctcagggggtcattggcaggtcaagtgaggggtggggatggctgacagtgggtctgaaccttgatggagagcttgccagagcattctgatggccctacatcagaaacttgatagcatcattttactggccctcagatttaaggaggaaaaaaatgtagattttgatcggagaatcaagtcacatcataagaagagcaggtaaggtggccattcttcgggaacatagtctatggggaagtctgtgtcagggcttcttcagtccattctagtacataggaagaatgcatcaggctggcactggtttttgacttggcttgggctgttttatttctgtagcactgaagatgaaaactaaggcccagtggatgctaggcaggagctccacaactgagccacatccccacagactggcagagtttgagctaagactcctaacttttttttatttcccttctgataaaaagagcaagcatggcagaacatggtagagcatacccataatcccagcacttgagatgctgaggcaggagtatttagagtttgaggtcactcagagctataaaattctgtctcaaaaatcaaaaacaggcacctggggagatggctcagtcaagtgatgtgctcgctctgcaagtctgagggtctctgtgtggatgtggatgcctgcagcctcagtgctggagtccagtggagtgccctggaggacgcctgcagctcatcagccaggcaatctaggccatcagtgggctcaaggttcagagagagacatcatctcataagaaggtgggaagcacctgaggaagacattcagcatcaacatgtggcctacacaccacacacacacaccatacacacacacaccatacacacacacacacacacacacacacaccatacacacacacacaccatacacacacacacacacacacacacaccacacacacacacactacacacacacacacacaatacacaccatacacacacacacacacacacacaccatacacacacacacacacacaatacacaccatacacacacacacaccatacacacacacacacacacacacacacacacacacacacacacacacacacacacacacacgaaccatacacacacacacacacaccatacacacacacacaccatacacacacacacacacacaaaccatacacacacacacacaccatacacacacacacaccatacacacacacacaccatacacacacacacacacacacacacacacacacacacacacacacacggggctcctcatgcacagtctccttcctttctccttgtctcctttctcttcctttcttatcccctcatctttctttctttcttttctttttcttctttccttcctttcttttgacagaatggtttttctacctagcccaggctgactctggactcttaattctcttgcttcaccccaacccccaacattgtgtggactgcaggcaccagccacaagccagtcactttgtagtctgtgatagcagctgctccccactagacagttagaacacttcatgtaagccaagtccccccacagctgatgcttccccgtgccagcgtgaccttgagattttcacactgactaaaaggagcctcttttactcaagttctcacttacttctgaacgtctgagtcctcacaagcccagaggtggccttcagcatccctggcactgctcttggcccactggggtgggggggaaatgctgactgtttttcttgggaacatagcaatttctgggtcataggatgtgaaactttcggttttaatgaagagtgctactttgcccttcaaagcggctatgttcatttgttctcctcccggcagcctttgagaatgccagcatctgtgtgacctcggcaacacctgatactatcaaactctcttcctactgccagcccaagggtggaagatgttttacttttgttctggcttcttgtgagggcaggcacccttcttgtgttcactagctgtcccatctcctcatctgtgtccttcactgccattacatggttcgtcctgtccacttagatcacatgggtaatcttgaatattgttttctgcagtagcttggtggttggtttgtttttgagtggtgtggccccagcccctttcacacacatacacctagcataacttaacttgaccttgcagtcctcctgcttcagcttcccatggggctggagtcacaggtgtgagcatgctgttatgcctagctctttcagtattttgtacttatattgcttacagttattgacgtgtgtgtatatgtgtgtgttcatacatatgtcacaacatgtgagaggaagtcaaagggcactgtatagaaatggttctgtttgggctggagagatggctcagtgattaagagcactgactgctcttccagaggccctgagttcaatttccagcatccacatggtggctcacaaccatctgtaatggaatccgattccctcttctggtgtgtctgaagacagcaacagtgtactcacatacatgaaataaataaatctttaaaaaagaaaagaaaatgaaatggttttcttcttctactatgttggtgctaggggttgaattcaagtcatcaagcacttttatccccgagccttctggccaacgcagtgtttcttaagggaggtctaggtgcagcccttctgcagtacagtcaaagaggggtccaggaaaatgaggtagatgggcactgagatctgctacagggcgtgctagagtgactggaagacattgagtcaccagcactgagcactctagagagccatacagggaaggaagctcctgaggctgccatccctagggcaggcagggaggactgtctgccactgaaccccacctacatgccccatccatcgcagcacctcaacacaatggtgccctgtcttctgactcccaggacagcccaaacctactctcttaaaagattcagactctgggcaaactagggttccactcagcagctcttcaggttcctcacagatctgagacctccacgtgggaatgctcacagcccacacttggggtagtctagctgggacaagtgactcctgagagcccacgtgcagatcactccaagccagtactcactggttttcttcccatcataaggtctctggactccacttccttccatccttgcctgtcccactgctccctcccctgcacactgcactctatttcttataacccccactgtcttcatgggactctgatgtctcagtgacatctctgaaagctgctccactttggggtctgtccttcctcttttttttttttttttttgtttgtttgtttgttctttgtgataacagtagtagttctttttccctgaagctcctaagatagctcagctccatgagccccaccatcccccaaaagccccaagtcaccatccttcatgatagctctgaccttcaaaccaggtctgtcacagtgcaagggtagaaaaaagatgcaaggtcctgaaggaggaggaaggaagagggcagggagagaaaatgcagtggccgagtttgggggtctgtggtggtattgttgtttgtttgcttgcttgcttgattgcttgattgtttctttgttttgggttttgagtattgtggtttggttggaggggttattttgtgttactttgctttgttttgttttgctttttgagacaggtttctctgtgtatccctggctgtcctggaactcactttgtaaatcaaaatggcctggaacccatagatccacctgcccctgtccctgtccctgcccccacctcccaagtgccaggattaaaggtgtgcaccacaatgcctggctttgttcacattttttaaagtagaagattctcactgaggaaatattttaaatattgagtaaaggaaataaacttcacctcttgataactaaaaagacatgaaagccatgcaatatggaatttaaattccaaggtgcagaggactgggagggtggtacagtacttgccctgtaaacattaggactagtgtcaaatgccctggatatgggtggtgtatacttatgccctgaggaggcagagatgcatggatccctggaacttgctgaccagacagccagctatatttactagccccatattccagtgagagaccctgactacagaaacaaggtgagtatctcttggagaatgatacccaagcttgatcctggcatacacacacactggcatacacacacacacacacacacacacacacacacatacataccaccaaaaaaaaaaaagaaagtaaaataaaatccaggtcaaatataagccagacctagaggctcaggccttgaccccagcacttgggaggcaggaagatcaccttgagttggagggcagggtaggctacacaatgagtttgaggatgaaatagaatataccaagactctatctaagataaagttacatatccctgatcagaaagctaggatggaaatagagattcttgccataggtaacaagtccaggcaatcgcatctatttgagctgacattgcttcagggactgcgactgtcctgagtatcttattccaaagaagagatggaagcataaagcctgttttaaaaacaaaaacaaaacacagggaaaacattctggaaacatttcacacagaagctaggttttcaggcaacttatacctcaaaggtcccacagaaactattctcctatggtggcctaaagagagagaagagggaggttcctctcttgtcctcaggccacttagaaagtggcaaacatgtgtatagggtacaatgccctttagacaatacccaagttcaagtttgttacatttgtatttggggctagactgtctgacctttgttgcctcgccctgggtgaggagacctataatctctgtagaggtacttttctcacattgcaaagccatgaaactacatggtctaccctctcttttatttaaaattgtaatatttcccactgtcatagcttataaaaagttttggcctccacctgaggggtggtaagcacacccaaacctggatagaacctcacacatactcacctctttgctattgaactacagccttacctaacctcacatgagcatagtctgtgtgcatgtgtcctaacaggagtcaaacctacaaccttgtgcttgttaggcaagtgccctaccactgagctacatttccagactcagtatgatttttaccttagtttttgtattgcacatcttaaatactctctcatttaaaagtcatttctagcaatattgcattatttatacatgtaataaaaacatgctcaggcatggtagtccatgcctttaatctcagctcttgggaggcagagactggtagatctccacgagtttggggccagcctggtctacaaagcaaattccaggttagttattgctaaatagtttctcaaaaataaacaggggtctggcaagatagctaagcggataaaagtacttgcagccaagccctgaagacctgtgatcaattctcagagcccacatagtggaaggaaagaactaactctctcaggtctccctctggccttaacacacatgtgagatgagtgtacatgcaaacacataactaggtaaatgtaataaaagcagtgatttttaaatgaaaattcttccattgattttagccctcccagccccccccccaacatactccattcctatgtcctcctcacagacagccattgttcagagctcagtttactttagtgttgttatatgagtttgtaattttacatctgatggaaaaaagtcaaggtcaagttatttccccattttgggacatttgtggattttcttggtttggctatctcattgaaagcataaatgaaagaaggtgtcactgggcggaactcagagtggactgcaggtgtgactgatggcttgtgttgtcaggtaacttcagagtcattggggacaggtctgggtataaatgtcaagcaggagaagggacctgggatatgctcaggagccctacgtgtactgcttcacacgagtaccttcctagcagctgctgttttctgtaccaattatcctgagatgagggatcttcctctcattctacagatagagagccatggctcagagggctcaagggcctggcagatggtcacactccacctcgttcagttctgggttctaagttgccagacactgaattgaggacttgtggtgctgttgtagggaacaggggatcttgttttcctgacttcacatgatcaaaaaccatcatatctgtaaactacctttggtctaaaagaaacactaaaatgttcctgggattggctgctgggtgatggtagtggctctggggctggggatagaacaccagcctcatgcattccaggtgcttctacccctgaactcagttgttagctattttcacactttagtgtgtatacaatacctaatggtttgtgtgctttgtatcagtctcaaagccatcaggattgctttgagaacacactgaatgtgaggcttaacgagatgaagggactctcctagcagaagtggctgaagaggcatccaagcccagttctatatgtgaagaaagctggacatctgagctaggccttattccactctccactctctcctcccagataacagtgacttgattgcatgcacagtcatcaccaaggatggtggtatggtccagcggttcctggctgtggacatttaccagatgagcctggtggagcctgacgtatccagacttggctggggagtggtcaagtttgctggccttctacaggtgagagtctaagaaccccactctgttttctcactctgcacacatgcatggtaaaaatgtcagttttatactcacttgtaatggcacaagaagtatgcacacaaaaccggagtattgcacagagaacagccaagtcccttttaccaaaaccttaatcttaacacctctccttcccttcggagaaaacccattgccaagctggtccttccagatctgcttcactgccaagagctttttaattgtgtatccatggaactgtcagttaaactcagtggggaaggaccacatggttgtacatgatctcagcattcaggcagtagaatcaggatggcatccacaaattcaaaaacagaccagtctatttaataggttccagaccagtcaggtaggttcatggagcaagacctggtctcaagataaaagggtgttgggaatgaggacagtgtgctgggggtgaaccttagttgatatggagtgctcacccagcatgcatgaggcccttgattccattcccagcagcacatacaaatgggtataatcatacatgcctataaggaggtggaggcaagatgatcagacatttaagggcagccttggctacctaaggagtcagaggctagccagagctacatgagaccctgtctcaaaaaacaagacagaccaggtatggtgatgtacatctttaatcctagtacttgggaggcagaaatgagcagatccctgtaagtctaaggcaaatatggtctacaaaccaaatcccaggccagccaaggttacgtagtgatactgtcgcaaaaacaaacaaacttcaccaagaaatatgtctgctataaacatgtacagactttcttttgactctttagtccctaaacaggtatttacatagcacatatatggtatcaagtcttatgcatcatctagagtgaatttagagtctacaggaagatatagtaggttatatgcagatactgtaccatttaaagtaagggccttgagcatctacagattttggtccccagtttggtagggagtgccaagggttaattgtacatgagtttgagggtatgttagattcttatgccatatcgtagacttggcctatctcctagcctctcttggagtgtctagccattttagcagatgcatgcctgctggggttctcttaactgctgtgtggcagggcatgcttggccagagcgctcttgataatcccagcttttcaagcatgtaaacctggtgttccacttcctcatgccccgggcaggatttccctaggcagatacccaagaagttggaatcagctattttaagagttcatagcttctgccaacttcctctagcactgttgttatcacaggagttcctgagcacaccctccctgaccaggctctacagcacctcgtgtctgctggggctctgtcttacaggttgataagtatgatggctgagtagtgactagctgcagagggaatgaaacacagatcccacttcctctctctactgtgtcctgtcccagcctggggctcccctcccctcacttcaaggaggtccatttcctgctgcactgctctgattcccagaagaccttgcgcaggctgagttgactcctaaccacagcggtgggcagcccattgttgcctgctctccatggggagcgcctgtacatgaagccactgctcctgtctcctctccttcccacactcctccctttccagaccctcttactctcagtgagggtgtaggagaatcttttttaccccaaagtgactcccgtgtggaacactgcccggtagatggcctgtgcatcttcttatcaaggtacaccaatttccttagaacacaacatcaggaaagtgtttttctctctcagacgcttaatgtgtcagacaatgaaagccacactccccccccaccccccatcctcttttggttctcttccagtagctactatttatcagactgttactacgcaccagatccttgctttaaactcataatagctcatcttatctgctgctgccctgtgatgcagccattctttccaaagggagagccaagtgtgtggcctccaagcacagcagccccttccttctgaaccttcttcagtggctcccacctcctctagcatatctgacctttgagtctatcttctgtctggtacgcttttatctcatgtgcccttgaacctttgtgggcacagacttgacacagaacccatcctgaggctttatgggaaccagtccttacacactcattcctcgtcaatgtctttatccctttcacatgcagcttgcctgaagtctctgccaaacaattctagtggcccttcctcagggactgtcctcaaagatgtaccaaaggacaggaacaatgcctcattttgaagagaaacaaggaggtagtgtttaaccaggtgacaaaaaaaggctttggagttgtggcctctggttttccagaaggaagaattgttggaatttgcctgttgtgacagtggtggcccttgaagaggctggtgtacctcttgtggtcaggcatctcaagtcctcatggaaaggagaattagccatacatccagcagctgattcctcacctgtcaggccgggactgatctgcatcacccttaaatctttgagatgtagcctccttcagaacaaaagcagatgcaaagtgctggtgtctttctatatgagccactgacacccctatcaaccctgggcctgatgaacattttgcctttgccttctcgctctgcaggacatgcaggtgacaggagtggaggatgacagccgtgccctgaacatcaccattcacaagcctgcctccagcccgcactctaagcccttccctatcctgcaggccaccttcgtgttctcggatcatatccgctgcattattgccaagcagcgcctggccaagggccgcatccaggccaggcgcatgaagatgcagaggatagccggtgagtgacctcaagagcaaggactccccaccgcagggctgtcaccagttcacattgacccagaaacatcccaagacttgaaagaatgggactttccctgcttcccaggtgtttggaagggagacaatcctcagctgctgcgtggaagagaaggggcctctgtaacagacaagaaacaggcgcaggcagggggcagctggcacctcctcttcacgagttagcccgcaagggtacaagggtatagtcacaaagcattctgactgccctctgccatcttaggtatgcaaacaggtcttagatcattgtacaggggaaatttttagtcacacagagaacaagtttgcagagcttcctactcagatttgtttgtttcagctctgaggatgaagcccaggacctcacacataatttttctcaccattctctttgtttccttatcatctcttggtgagccgccagcagccagcacccaacactaaatccaggagtcattcatacctcacagggatggtagagtttgcatcacccaggctttcttagtaaaagccctgaaataaggttgtttcttcaagtcatgaaatggaagtcaaggcattgtcctgaggcagggtgaggcaggggagtcctaaccgctcctttaagactctcaggctagagctgtggctcagttggtagaatggttgctgtctcagtcagggtttctattactgcacaaacatcgtgaccaagaatcaaattagggaggaaagggtttattcagcttatacttccatactgctgttcatcaccaaggaagtcaggactggaactcaagcaggtcaggaagcaggagctgatgcagaggccacggagggatgttctttactggcttgcttcccctggcttgctcagtttgctctcttatagaaccaagattaccagcccagagatggtcccacccacaaggggcctgaaacccttgatcactagttgagaaaatgccttacagttggatctcatggaggcactttcccaactgaagcttctttctctgtgataaccccagctgtgccaagttgacacaaaactagccagtagagttgcctagtatgtacaaagccctacatttgatctccaacactatatcaaaccagttataatgacacatgtctataatgccagcacttgggagggaaaagcaaaagacttacaaatttaaggtcatcgtctactatatagtaagttcaataccagcctggctatgtgagaccctgtcccacagaagatacaaatgaatgaatgcatgcatgaagaccgaacaaataaataaatgaaattattagtgccttcagctcaggcccacagtccctccattatggctgccaagggatgtccagcccactgtgaggaggagcattctctcaaggaacaaaggcagaataagctccctgtgtgcttcatttctggctccgcagttccatgctgtgtgtgcctccgtgatgtgcatcagagttgttcgcccttcttgtttctcacgtagctgaagcctcgcctgcggaatcatgacagaaggattttgtaatgtacaaagtgacttagattattcagcccttcctttgaagattcatttccagacttttccctgtaatgtgaagcactttctcacgctggcataaaggccagatatttcatttgaaaattgaggattgcactgtaaagtggctgctagcatggctgccttggatatttcttaaattgattttgaaaagccactttgaactaatacatctcaagagttgttaagggaagatgatggctatgacatgtaaacacacactcataaatacaaacatatgcttccttgtacacatattctcataagcatctatagcaagattccaccaccaagatatcaaaaactcagaactagggctggggcagcagctcagtcaggtagtgctgctgcccaaccatgaggttttgagttccccagcatccatgtaaaagccaggtatggcagcatgcagctctaatcccagccctcgggggatgaacacagagaacctgtaggactggttgtctagctagtttagcccaactgatgagcttcaggttgaacaagtcaccctgtgtcaaaaaataagataaagggcatgcaaggtacctcaggaagtaaaggtacttaccaccaagactaatgaccagagctcaatccctagaaccaatttggtggacacaaagaactgactcacaagttgtcctttgacctccacacatgtgccatgccacacaaggatgcctgtgtagtacatgtacatgaacacaaatacacaacacacacaaaatagatatagaaaaccctttttaagatggtcagcattgacctctaacctccacatacatatgtacacattcacgcacacaggactctgaaaactaattgaacctctgctgcctttttctctgtgattactccctagacaatataggaagaactccttccatagtactttgatcatattaaatataagtcatctagagatgataaatagtagagaggatatgtatgtgtcatatacagatataatgctattttttataagggacttaattacagattttggtgtctttgtggaggagtcctacagatactgacagatcactcatttgtatattttgtctgtctgtctgtccatgtatgcctgtgcataaactttggggggtagaattggcctcacttgctctaggatctgaaggtgtgtgtaaagccaagcctttgggaagggtcttttctacagattgcaggtactaactggccaaagactcagaaccctgccatcttggcctgagccccttcattgcagttgtgttttgaacttccttagggactctggcatcctgccagtctcacgcctcacgctgtctgtttggcttccccaagggtcttactgtcaaggctggtgtcactctggcctgttgcccaagttataacaaacttcctgtccccattacgcgtgctaagaacaaactatggtgctgtttgcttacagcccttctggacctcccaatccagccgacaacagaagtcctgggatttggactctgctcctcctcctcctcctcccagcacctgcctttccgtttctatgagcagtgccgcagaggcagcagtgacccgacagtgcaacgctctgtgtttgcatccgtagacaaggtgccaggtaagccacacctcctgctagggactcaggcagcttttctgctgagcccgctagaggccttcctctcagaatccaggctattggcagctctggcttcatagagcatgtgagacatacagacttggcttgcccttttttgttctgtcacttgggtttggtttttcagacatctcttaggtttgtgaagaaacttgtcagaatcaatgtttcttggacatttcttgactaattagtgctgagagttgaggatgagagatttcgtccttcatgtaaggtgactaggagctagtgcatacagttcctggtcccctgacaagggaagccatgagtgaggaagtcccagtacccacaggccttcggcttcttccctcttctgcaacaatgtatccagtcctcctgcccttccctaaaagagagattcagtggaaagtccaggggctgagagagctgcttcttaagaagagcagcctccttcctgcttcgacatggtctaagtgtatccatatgcagaaggtgccaccggctggggcgggtgggggaatgaatgactctcttctcttgattgtaaatcttagaaaactggccaggctctcccctgctcttaacccttgcacgttcagggctagaacttatattacaggtattatgaaatattctcaaaagtgattactgatgttggatcaacaaaagccatgactgcctgtccaagtccaacacttgactacctctgatttagtctgctttcacccgtgattggatttctttatttcatgtataccataagtatatcatttttaatccaacaagatttgatagaatgtgaagaagtcccttttgctccagaatatgtgaacagttttttgtttcttgcatgtctttctagaaatgtttgcttgtatgttttatatatatatacatatacatatatatgtctttgcatatatcatgtgatgagttctatgccatgcatgtgattctccattcccctcttgatacttaatctaccacatatcaacataacatcaaaagcataactgtctatgaaattaactctattttttaaaaaaggaaataatgactgtacatttttgagatcttactgcctggcacacagtcaggcctagagtgcttaaggggtagccttctcttggcctctggaagctcatcagtcaccttggagagaagcatacagaggcattgccctggggcagggtgaggcaggggagtcctaaccgctcctttaagactctcaggctagagctgtgactcagttggtagaatggttgctgtctcagtcagggtttctattcctgcacaaacatcgtgaccaagaagcaaattagggaggaaagggtttaattcagcttacacttccatactgctgttcatcaccaaggaagtcaggactggaactcaagcaggtcaggaagcaggagctgatgcagaggccacggagggatgttctttactggcttgcttcccctggcttgctcagcctgctctcttatagaaccaagactaccagcccagagatggtcccacccacaaggggcctgaaacccttgatcactagttgagaaaatgccttacagttggatctcatggaggcacttccccaactgaaggaaaatggtctggcagttctcagagagagggggtgtcttactgttctcaggctccagcatatacctggagaaccagtgctgtgccctgtctcagcttttacaccagctcctttatctaggacttgagtgcccacctcccattggtggcccaaccccaatgtgtgggctccatccttcaaaggccttttattatcatgctgctgaccagggccaaacccttcccctatgacattgccttggtttattttctccgcagaattcagttccttgtcaggttgtaggctggggtctggttcatttgccccgtggagaatgtcactgtgtggaactgttctgttcaccactctgcttccgtgccagcggtggcttcagtcagtgtttgtcaagtgcagcataagcctgcatttgcttctatcggaacaccgaaaagaccaggatatcctatctaggacccaggcacctgggggtttggtctgcctagggaacacaggaccaggacccagctcttcagcagcaccaccaccaaacttcagttgccaaaccagcatgtgtccccaagcaggaggaccctggccatacagagttagggtgacttcaggttacagaatatgtccccaaccctcaccacctgggtcagctttgcagaagccagagtaaggagagtcaggtggagaccattggctactcttcagcattcacagctgccttctggggcctgagttccatgtgtcccttgtcaccttctgaaatgacaggtgttgactgtggggattctcgccgatctcagggctcacttgattgggatacgtctttcctttttgtttgtatcccaggtgatgcacacaggcaagtgtgactctaaatttgattatatttgatggaagtgtgcctctctcttcttgggagaaagagtaagatggagtataagccaggctgaggggttagcagctagccgctctaagtgtttggatttttgtttgtttttgtctgtttggctaagaagttacaaattctgtttatcttctgctctgtattgatggctcttgccaccccgtgggcagctttctagggcagagaattcctagggagggaatagcagtggtagccaggatggggcagcagttacttgaggagtgccccaagccctcgtggcagtagctgcttccagagtttgccatggccagcaggatatgctcagcacagccttgaactggtgccccgagcagaagctcttcccagcagagctctgtgcttaagactaagttaattctttgcatggatacaccacatcttgctaattcagccccgccccgccccgccccgccccgcccccacccccactgttgtaactatgaacctttataggtttgcaggttttaacttcaaagcatatgcctagcagtggccaagtggtcatttaatgttttgagaactgccagaccattttccctcagtcttttcaacccttacctttagctgaaattgaggttaattttccccttttgcaccatggccctgcattggaatgagaggtacatggagtgacctgtttttctaggcaatgcacaggtctgccttcccaccagttggtctggctctggtgccagcagagtcacacttgatgctgttaaaaggggtcctctgctctcctctcttcctgccccagcttcctgccagtgtgagcatttttatgccttgaggcaggcatttaaatcacagaggaggagttggtgagatagctcagttggtaactacgtaagcagtgaggacctggggctgtgcagacccttgaggctcactgcctatgcaccctggttttctcagtaagaatggtgccagggggaactcctgtcgtaaaagggaaaaataaggatggatggtgcccgaggaacatccacaggtgtgcacacaggagcatacacttacacacaaatctccaggatctggggagggccgctggcccaggtgctaccaaggcaaacccagtcttatcagttgcctggcccagaacacttaatagctctctgcaacagcctgccattccaggacaacaatggcagctaagtagcccaggaggaatgtaagggtgccgagctggaaggtgccaagtgctgggggcctggcaatgagctccagagaggaaaagctaacaagcagagtattaagtattaatatgtgggcatcagccttgactctccagcctggggacaatatgcaaggcgctaatgtcctcttgggggtgtttctgactataaaacaaagccagctctcttcttccagcttcccaagccagaagattgtttctgagtcacccaggaagggggcctgccacccctcggcctccccagctgccctcagctccctgtgcagactggcctgggccagccaactagagacactgattcctaccctcctttttagtgtagcttttacaaagcaaagtacactgggctgctgggcagttgacaaattattttcctctggtagtcccaatatttctgcttccctctctgcatgtgtagaagtaccctgcacaaggccataagcctgactaaggtcaagtaacataagcaccacagatgctacagcaagtttctcttaatctcgcagcatgacacatcgaaatgagccatcctagcctgcttttagaaacaaaggcctaactactgccacccaaggcctcttgctcccaggcacattgccgggtgtgtagtacatactggtactcccagcacactagacacttggccatgaggattgagaggtcaaaaccagcctaaagttacatggagagaccctgcctcaaagattaaaaaagaattgcagaaatcctgtctatttctggaagtataagctctgttggggaaaattgtctgtatctggcattttctgtatattaactctcagttccagacagctctcaaagctgagtccctgccctactctcaacattagaaactgagatccagactgggacctcccagctcacaggaagcagacgaagcctgtctctaacccgtttgcttcagtttgcttcaaggctgccttttgtgaaggctgcaccagctcacatggttttgctacaagtctcagcatgacagaggttatagattaaaccgtttttagagagcagcctcacaggtggttgtggcttagggtatactggtccccataatctacacccccacccttgcatagacccaagtcttgtgctttgagacctgtctccaaaggatcaagtatctgaacaaagatactgttcagaaaaatgctcttccagactacttcttgaccagactggagggcaagctcacttgcacaatggtgttcttggcccacataagaaagaacagaaacgacactggaattgacctcaacaaacagcagcagttgagcgctgacactcatcagtaagagactgaccttcaagagctaggctgggaaccagggggatgctcagtggatgagagcacttgctctgcaagcaggaggacctgagcccaggcgtggttgtgtgtaccacagccccggcattatggaagacacaagggaaccccaagagctccttagccagtcctcctagtcaaaatgatgagcttctagtctagtgagaaacccctttccaaagtaataagacagaaaatgataggcagtgacaaatgtcgtgctcatgcctccatatttatatggcatccaccacacacaaaggaaatcgagtcagagtgggtgtgactgccaccaagaagtcagctggtggttcctggcttgccagtcctcttttcaaggtgttagggcatccatgaacagaaggcttcagaggctccccactgggagcccgcccacgtggaacatgaccccaaagtgtctgagcagacaaaggagcagttgctctatataaagccctgtaaagacagagcccagccacccagcagagcagcctccaggcctatgcctttcctcagaggtagagggagggaggggctgagttctcaagaattgaatgttgctacattgctcaagggcttgacctacttcagggctctggggtgactgtgtcctggagctctctccaactgaacccaagtcattggtgtgggaagagaccaaaaccctgtacctcacatgtgaggctttgcctgggaaggtttgggaaataagcctctgtgacagggcagaccagacaggtccatatcagcattgtggctctgctactcctgtgtgtgcactgaaccctgggagccagaggcctggcttctaattcagcctcctgcttcaccttacacttgctacataacactgctgacctgtgcaccttagaaagagctagtaagaaaatgtgtgtgtgtgtgtgtgtgtgtgtgtccccacaattgaaaacataaaacatagtggcacatgactttagtctcagcaggagcaagtagatcactgagttccaagccaacatgagctaccaagtaattaaaaaaacaaaaaccatgaaaggcagatgtcacctatctccgtaggttcttgtgtatatatccatccatccacctgcccaaaatgcagctactttcctagcgtgggtgacatgtatgacgagtaaactccatcatccaagaccctgttttgtggcttcttcctctactcatgagacaactcaatgagaaaagtgcttgacacataaaagcacagggacccaagtgtgagctccagagcccaacaggagggtgtttgggttcaactgtagcgcttaacagagtgggtgaaattctataccctgatccagaagaggtctgcctaagagcccatggcttatagaggaggtcaggccagggccagagaagagcagggagtcaccatctaaggctactcacaagctctaggaatcagtcggccagtgggaaatccgcagtggggaagagggacactgcgcccaaggtcacccaccttctgggtggccagccagggatttgaactggagttgactgcttcccacaccccacaaagtgtgttgtcttcagttctgaggatgccaggtgacagaactgcaaggagccattgtgctccaggtcccctgagctctctgtggctgcactccactcctagtgaaccaagagctggagaggagatggcttgtgtggagacaggtctgcatctgaaggaagagaccctgagaaaagcatctggagaaacttgagttcaccttgtgtagggagtggtctcgtttgttctgtggctctgataaacaccaaaccaaaaagcaacttggggatgaagtggtttgttttatctcacagtccagaagaagaagaagccaaatcatggtcctgaaggatgcctgcttactaccttgctttcagtcacctctcctagacctagggatggtaccaaccacagtggtccctcctgtatcaattagcaatggagaaaatgcccacaggccaatctgagggaagcaattcctcaattgaggttcctcttcccaggtttgtcagatcgacagccaagataagccatcacatgcgtaagataacatgagtgtgtagtggtaacattgtggaggtcagaggtcagccttgaatgtattcccctgaaaccatccaccttgttttgagaaagaatccctcactagaacttaacttgctaattaggccaggccagtggccaataagcttcaaggatctgccattctcccagactctgggattcccagtgtctgctgctacacccagtttttaaaaatgctggttctggggactaaactcagattctttgctaatcgagctatcctatctctgagaaaatgattcattctctttcttttgatgtttacttttgtttctgagtcatcttatcaactgctgattgtcattagcagataattgataacacagacaaaaaaataaaagtgtgtttgcagaagtagactgtcctagcccttgcttttccaagtgaatagatgaaggtccactaggatttagtattttgcctcagatgttctatgactagcttaaggaacttcaggttgccttctgaaacaggagaaaccactttacagtttcccaagaattagccacagtcctccgtttgccatctgagagattgaatctctgagtaagtagtattgctgaggttgagacagctgggaggaaagttaggtcattcacaagaactcattaagagtaaggaaaaaaatagcagacagatgtggcaataacagtgccaaaggtcaggcgtggggggaggggacagaaggtcttgactctgacatacacataaaggaggagaccagcaggttttgaagggatgttttaaattctaaagaagacctgtctggggtcttcacttactgtctggggttcagaagggaagaaccaagcctctaagccagtgtttaccaaatgctgggctgggcctaaagatacaggtggcccagatcagatcagggaggcccaccctcaccctgggacagagaatgctctgccaggacctcatcaggcacaagatggtgcctgccaagaaggggtgaagaaaagactggttgagttagggccagatggcaagggctttggggacctgttgaagggtcagattgatcctgaagccactgaaacatgaaagtgtctaaggcagcacaggatgcaggacaccctggacttggccttgatttgcctccagctgggaagcttgcacacttggccccagtgttgcttgctcacacctggacaataagggcccgtgcacactggacaataagggcctgtgcatactggagtgatgcctctggtgggagcttttcctgggttggttgccctcctcctcctacagcttccctgtgctacccatcacctgcactctaggatggctctgacttttaaaacagcttcttagtaaccaaggttggccttgagttcacagaacgccaatatagggttatattgctttttttaagaaacctaagtgccctccattctcactcagccatatagcttagaggttttctttgagctccctcattcatctagacattcacagcccatcaccaatgtcctatgggtagattcctaggctgtaggcagctttttgcctttcaacagatagtaggcacctctgaagactcttgcacaaagctttgcaaggggcagtgacaaaaaactcaaatcctcaaaagattggaagtcagaattacccaagtgtgacaaaacgagctgttttcacagctttccttcacacttaatgccatcttcagctcggggtgagaaacacccccaaactggtcagctggttccaacactctgctctgcagtctctgtgagccctgctggggactcaggacacaaaaagccacctattcaggttccatttgaggagtaacaagataaaaaaaagtacaagccaggcatggtggtacacatctgaaagtctagccgtggggagatggacaaatttgtgctagacactaggctacctatataaaatgaggagagaaaccgaggtgtggtggggattagccaagaaccatcttaattccatgggctgggatcctggactgaaaaatggagaaagctagctcaagtccagcattcctctttctttgctccctgactgtgactcctcctgcctcatactctttcgccatcatgattcacatgccatggtggacttgaaactgagccaaagaatgccctttcttctttcagttgcctttgtcagggtatttttatcacagcagctagaaacatagttaaaacatataactttattaatcgctcactcgtgcacagctggtccagcaagactcaggaagtggcgcagaggctcagagcaggcctgctgcttctgtctgctgggttcctgggaaacatctgacctcctcctgctctttgttctctttcctgctaagtcagctagagagttctatagagcctctgaggtaaaggatccttctgttgtggctttctcagcatggtgaccgtacaggtaacaatttaggcctccacatacactttagactcttggattggcagtgtcctcataaactttgggaacagccaagtggtaggaagagttcttcatggaatgagccttccataaacaaccctgaacctcatgggaataaatgtgtttgctccttttcccccaagttccaagccagaagcccaagggaatgtacattaggtcagaacaatgcctagctggatggactgactgcttatggttctccctctcaaagaggcctttgagctggccagcagaaagcacccacgggaagtgctgggctcaatagtgtgaagcctaccaccacttgagtgcctgctctgcagaactgcatgtcactgctctgttcccacagtcccctgtccctgccaaggaagccctggcagaaagatgaggcccactccccagagttaggtcccaaatttcagtccacacctgcccacagatactgtgtgacattctgtagatccctgagccttagtgtcctcttctggagtaaaattattgctgtgccagcacctcacagaaccactgaactggggtcataatgaggagagaacccagctcaggtaaagaagtggcacccagggccaggagctctatagtaaccagagcacctggctttatgcctgcctcctccagacagcaccgaagatgctcacaggcttctggccagggttctctggctctgccagccatgctatggcaccatgagggttagcttttcatgtagcacatgtgcaccaagacctcctaaagtctattaaatacatcatgctgaagtatccccatgaggagggtcagcatagtcatggcagcagtcatgcctgagctactggacattgaagacccatagactggagcacagagagaatgggagaaggcagcctccggccactttaaacaggagcaagtggttctgattcatggttgtctaagctccttactactgctagaagtataagggaatggagacaacatgtgagactctggggtctcccagaatctgggcagagttaggtaagggtaagccttctggcttggtagatctagccctgggactactgctggacctgaagctcatgcagcaccttcactgtgacagagtgcctgaagtctcagtcagtcacactaccagaaagaggtcgtgctctcaattctgttccctgcctgccagctgctctaaggtaaaaacatctaaaagtttggccccactggttagagtaacatgagcctacctgcattgctagcagcagcagagtatctcaccacccttaacagtgatcctgagagacagttgctattgctcctctttgagcaggtggggaggactaaggcctcaccaaaagccacagagcagtatatactgttgctgaaaacctgcctggttcatcagctccacaacctttggtgtccagggagatattccagggacaaaccagaggaagtttgggctatgccctggagaagctatagcttgcccttgcctattaagtcctcacatctgactcctgggccagagaagtttgcctgatagatgtgacatgtaaacagctttctctcctactttttctgcagcaaggatggctctcatccagagttcttgaagataatattactgaaaaggctccaacctgcagtggtaaatccagaaagtttgaggactgaacaatgtagtcaaggctttcaggagtggagacttagctcattgcctttaaatccatgaaggggcttctctgaagagagtggagtttgtctttccatccattccctcttcagcaagcattcactgaggacctatagctatcatgtgctggacttggcttaatggctctgccacatgaagtttgccatactgtaactagttagcctataaggaggatgccctgactagtgaagttgatgtaagctccctgagtaggtggaaaggcagagttaacagcagtggatggagaatagcatgtgcaacttgcatcaggaagcctggatggggccaggcccacgtggctcctactcctgctctatgtcctagcctgccctaacagggtccaggtagccaggcatagctccttaaaaatcaagagggtttggcaatgtagcagtacacaccattaatcccagcacttgggaggcagagacatgctgatctctgagttcaaggccaccctgtaggacagtccttggcttgaggccttaggcaggaccagccaagccttatcattattattatcatgtgtgcatagtgtgtgtggatacaggtatgctcatgccataacatgcacgtaagtgagaattagcatgtgcgcagtgtgggatacaggtgtgttcataccatagcatgcatgtatagtcagaagcatgcatgtatagcatgcatgtatagtcagaagcatgcatgtatagcatgcatgtatagtcagaaggcaacttccagagtccgctctccttctcccttggtatgggcaaagagctttagcctgctgaaccatcttgccggtcatagccccataaacttatgaggagagatgaagccacgctgtgagggagcttccctgctggactggaggcttctaggttcttctgctgaccatctatgccccagaatggatagagaagttttcctgagtttcctctatgttgctttacaagaggactcctgataaccatttcagtgacaacagtgactgcactggcctgccaccctagcaccagctgtggctaccctggcacagggcagtgtgtaactgagttccctcctcccattgagctaaaatagctgccttgtccgatagcctcccttctgtacagaactgtgtttcctcacgtatttggcatacaagggagcctgggtattggagtaggacacatagaaaccatagatttagttttagagtggccagctcagtgcaactagtaaactcatcatgggcataattctatatcactctctgttccaaaaaccggggagggggagagtctagaccagtggttctcaaccttcctaatgctgccactctttaatacagttcctcatgttgtgattcacaaccataaagttactttcattgctacttgaaaacagtaattttgctactgttatgaatcgcaatgtacacatttttggagacagaggtttgccaagggggttgcaacccacaggttgaaatctgctggagctgaagatgcttccctcaggagttcacggtgtcctgagaagggaactcctaaaccacagcagcagcagcagtccaggctacactgagatgccaggccacccagggcaggaaggctctaggaaggggtcttaaagaaaaggcaaggtaaatacagtattatccaggaaggaggctgtcttagtcagggtttctattcctgcacaaacaccatgaccaagaagcaagttggggaggaaagggtttattcagcttacacttccatactgctgttcatcactgaaggaagtcaggactggaactcaggaaggtcaggaagcaggagctgatgcagaagccatggagggatgttccttactggcttgcttcccctggcttgctcagcttgctctcttatagaacccagactaccagcccagagatggtcccacccacaagggggtctttcccccttgatcactaattgagaaaatgccttacagttggatctcatggagacatttcctcaaccgaagctcctctctctgtgataactccagctgtgtcaagttgacacaaaattagccagtacaattgacctcttgtcaacttgacacaaatacatcactagtaagcctcaacccttagttcttattcatccccaagatcttaaataactttaaaagtcccacagtctttacatattaaaagttcaatccttttaaaatatccagtatcttttaaaattcaaagtctcttaactatgggcttcactaaaaaacttccatcaagagggaaaaatatcagggcacagtcacaatcaaaagcaaaaatcaatctccaaccgtccaatgtctgggatccaactcacgatcttctgggctcctccaagagcttgggtcacttctccagccatgccctttatatcacacgcatcatcctctaggctccagatgcctgtactccactgctgctgctcttgatggtcatctcatggtacttggcatctccaaaacactgcatgaccccttcactcctgggccatcaattgcaactgaggctgcaccttcaccaatggccttccatggcctctcacaatgccaagcctcagctgttctgcgtgaccccttcatgccttcaaaaccagtatcacctgggtaactcttacacattaccaagtccaacctcagcacatgatacaaccttggctatctctggaacacagcctctgtactctcaaaaaacacttcccagaagatgtcacctcaacgatgctggtgtcttcttaatcacctctaatttcttagttccagctaaccagcatcaatagtcccagtaatgcaaaggttttactttagtagtttctggtatcttgttaaccacagctgattcttcagccccagctaagcagaatcttcacaatccaaaatagcaatggccctaaaaagagtcttttaattttccctctgaaatttcacaagccaggcctccattttactgcactgttctcaacattatcttccaagctcctacacaacatccgacagagctcttaacagcgaatggatcttctggcccaaagttccaaagtccttccatagtcctccccaaaacatggtcaggttgtcacaggaatacccgactctgctggtaccaatttgtcttagtcagggtttctattcctgcacaaacatcatgaccaagaagcagttggggaggaaagggtttattcagcttacacttccatactgctgttcatcaccaaaggaagtcaggactggaactcaggcaggtcaggaagcaggagctgatgcagaggccatggagggatgttccttactggcttgcttcccctggcttgctcagcctgctctcttatagaaccaagactaccagcccagagatggtcccacccccaaggggcctttcccctttgatcactaattgagaaaatgccttacagttggatctcatggaggcatttcctcaactgaagctcctttctctgtgataactccatctgtgtcaagttgacacaaaactagccagtacagaggccaagatatgacaaccacatgagttgtcagaaagtagcaggttgatgcttcacaggagttatggcaaccttcctgaatctaagagctttaacctgtggaaccatcttaccagtgaaccactggggccttcaagagccaggctgacagtcacaaagcttttggagcaagaaaataattgactaccagggccagtccacgtcaggctgtccatgatatagaccagctggtgtctggatctactgattggacataggctcaaagctgggcatccttaacgtacccacctgtacttgtctcgtaggtgagggccaagttttcttttttattgtgtttgcttatgggggcatatgatgttgttgtttgtttggctttttattttttgaggattttttttttttttgagacaggatctcactaatagtgatccctggctagcctgaaactcaatatgtagaccgggctaaaccttgactcagagattccatgcctttgctctttagtgctgggattaaagacatgtgtcaccattgcaaagcagctgtactggatagcctttatccagcatggatgatggctttctcataaccacacaggtagaaccccccttacctaggctccccacaacctatatattctagcccctcctaagacactcccccatgccataggcaacaaaggcagcaatccgtacatatggctaggaggagtggccagattctcgggcaagggtccagtgacccttccctgccttttccttttagaaggagaattcaacagtctataggccagggaagccccttcctactcagcattctccatactgtttcctcatcttctcccctccacatcctgctcaaaccattacccagatgttaactgtggaaggcagatctgggctttggtgagtgctaaattccatctcctagagtctaggatctggactctatcccaggcatctaggtggtgcttaataaacattggatgggtatatagatgcatacactcacatagaggaagatgggtaggagatggatggatggatggatggatggatggatggatatgtaaaggaggtggctgggtgaatgaatgaatatggagggaaggagcagcaaaactttaatactccattgtatattcccttgtatgtgtcagccagtgttcactggggattcaggggaaagccaagcagatcagtccctttggatcatggaggctccagaactgcctgtcataatcagtgccctgatgtgctgttccaagagctggaataatattcaggaaagcactgttacctgaacttaagattcagaaaagcttctctaaggagaaggatcaaatctaggcaacatgtgtcccagacaagggaagcttggcccataggctgcctggatccctagtaatgaaatgctcactgcttatgctagattccaactcctagagtgtagaaccctagactgtgatgctccacagctgtttggagtggccagagaactccctttgccaccactgtggccagaaaagctggcctgaggtgattgtcagtcttccccttcatccaagagcatgtcagcacctggaatgttgttctgtgttgaatcctgttgggaggaatgttcctgggctggacctgactagaatgatacacaccatgccatgtataagaaagtgagcagcaaagcaggttgtagggttgagaagggcttgcgtgactccctcagagagatagggtacagtgcccttcctccctagaaaaagtcacatcaaccctgtgagtgaaagcccctggatggactgcagtggggacattgaatcagttagatgtagtggataacattgtatcagatggatacagtggcatgctctggttattccagaactcaggagaggaggtagaaatgccaagaacttaaagctagcctgggctacatagcacatccctttctctgaaaaaaaaaaaaaaaagcaaaacaaaacaaaaaaaaaaccattgtgttaaaaccacaattacaactagctgggctgtcacgaagccatcaccaggcagcacacaagaagtggattacctcatctgtgtcccatttaggccatattttccttaaagacatccaaatgtgaaaaaataacttggaacctgctgtacattccaggacaatctggaaaccctgaagcagtccagactcacctggcactcttcctcttctaaatttgcctttttcccaattctttttgactctgaagaaaaaatcctctgttcttaccagtaaaagagcctcctgttcccttttctttcctgtaagtcatggtaggcttgtatttcatacctttccagaagttggttggttgtggtctaacctcagaagcatggcttctgggaatgacattagctccacttctatgagctttagtgagacttcagaagcttgtccaaagctcacgctgtgggcgtgggacagaagatggcagctgtggtacctgctcactgctctggaagcaacttcaggtcctgagaggcagagtgccaacagctctgtccagttcataccagtggcttttaaaaaatagccccgatgccatgggggcagttagggctgggtatgtgctagaggccaagactcgaagcctgaagggcactgtaccatgctccagtgactgttttctgagaggttcctgcatccagctgccatgctcatctgcacagtgacatatgacatgaataacttcacaggggtaggcttcacttctctagtactttcaggggattcagtccatcgtgagagaagggcagctcaccacactacatccaggaaacaggaccatgtatggaccagcaagattacttagtgagtaaaagcacctgccaccaagtctgatgatctgagtggaggtaggagaatactgacccttccctcctgctatggcacgtgtgcatacatacacatgtgcacacacaaatatagattgacaatgagagacctgttctgttggtttcccctgccttttccatctgtccccccagcctatgggatagtgaatgccatattacctaattgtctaataaatgtcatcacagacacacccagagtatatttactaatctcttaaggaattttcatcccaatcaagatgaaccatcacataaacactaagtctcaaggacccagtccctatccagtgtcagacatgaccccatgtctgtttgtccttgttggaacacagtgttcctgagacagacagcaaagctgttcaccttgaggtcacaggatactggtcataaaagttggggaagaggaacggagatgagctctacccatcaaaagcacatctcacttcctccgtccccttcttacctactgtagcctagtcagttgtcagatcactaatggattaatccagtatggagtgagaaccccattgttttgtcccctatggaggcctgcctctgaccatttctgcattgcagtccaagccgtccatatacaagtctgtgggagttacttgatatccatgccttaaaatcaccacttggactccctcccctgcagtgctgaccctccctgagggtggccatgagaacacatttgcctcccaggatactgagcaatttggatgatgagcaaagagctggcagccaccccaatgtaactagcaatgggcctctgtactttgcatgtctgacaggtgatgtgccctgcacacaggcccccaggagttccagaaggagcctctgctgcttgcagaaggcaggatgtgcttctatccaaagaagtgctttggcgattatttattaattgagaaagggaagaaaaaaataatagggtttcctggaaagggataaaagttcaatatgataaactcccgaaaagcaatcaaaggccagagagggcaggaaaataaaggacagagagagttggagagatgatgaatcagagtggggcacgttagctgtcaggaaaggggctgtatttcatagccatgggggcggggcagcactgcggaactgccagtgggagactgccagggctgcagggcagggaggcagcttgccccacagaggtcaccaagccctgctgacatgaagggaacagatggaccagtcagctctttcatgtgactacaggcagcattgccttaatttttgtgctttagtgagtgaacacagaaaattacctatgaaactgcagctacaggcagctcactcccaagcacccagcactcattacaagagagttgcaaacactgcaggtcactgcctgtccctgccctctgtgtgtgtgtgtgtctgagtgtatctgtgtctctgtgtgtaggttgcccaagaggctcttaaaaatcttcaaacagtctggcacaatggcctggtgggtaaaaagcttgctgtacaaccaagaggacctgagtgcagatccccagcacctgtgtgaaaagctggcctagtttcgcacacatctttgcacataaaccttagcactggagacagcaggaggtgcgtgtgaacaagaggctcactagagttcactggccagccatctagccagtccatgactgccgggttcagtcagaaattctgtctcaaaaaattaaggcaagaaccaggcagtggtggtgcaggccttagtcccagccctcaggaggcagagcatgtggatctctgagtttaaggccagcctggtctacagaacaaattctaggacaaccagggctgcacagagaaaccccatcttaaaaagccagacaaacaaatgagaaaaacagacaaacaaaccaaataacaacaaaaaaataagacaaagaatgaaaatcaacctctgccatacatacatacatacatacatacatacaaacaacacacaaatacacatatactccattctatacacaaacactcacacatacccagattaatacattacagaataccctgcaggcttctctgactgttctcctcagttactctaccctaacacccctctttcctggtttcactgaccactttccagacccttccctatgcagctgcattgcatatgagcacccacaacccagggccataagtctttctccacagctctgaaatctaaatagctctgaaaaccaaaatatttttttctaactcatttggtggtgaaaccagccctgaactgtttctgagctgtggtagagttaatgagagttaatgcttgtttcctatggaaatgtaatgtttggtttcagctgaccaaagcccagctgtgggcaagacataatttgtgtgtgtgtgtactgcttgacttttaatacctaagaatgatgatttccagactcatctggccacagaggcgcaggataaggtgctgtgggcatctctacggtgctcctggtctgccttgtgaagttatggtgctgtgggccatatctctatggtgttcccgatctgccctgtgagtttatgcatgcacacttctgcagcactttctaagcttgcttttctcagaccctgccatgaattagaaatctgggttgttatttacatgttatttacattcctttctgtggctgcatagtatgccacagtggatacttgacccttttatccaagtgtccagtgcccctgactttcactgcccaggcggcagtgagtatcactgagcacactgctgtgtctgtgattcttaccatgtagcctggaactctctctgtagattagaccaggctagccttggactcacagaggtgtgtgtcaccacccctgcagacgcccttgctttaacgtgctgtggctctcattataaagccctcttcttcttcgcctctcacagctgcacagcctgttgtctgtgtttcctaagacatctgtaacaagatgttatgaactgggtggcttcaacaacagatgtttgttgtctcacagttctaaagccagaagcatgagattggaaggtaggtaggattggccccttatgagggtggaagagaaacgtgctccaggcttctctttggctactgaagattgctgatgtctttggtgtcatttggcatcttatgcaaaagatgacattctctctctgtctgctagtgacacagcttttcaccgctgtgacagaaggttagacagagtcacattaagaaggaaggctctgtcataactccagataggggtctcattccataggcaccttgctccattacttgcaggcctctggtaaggcaagagcatcatggcacaagggcatggcagctgcaaagcagagagagcaaggcagagaccaagaacaaagtgctgctaggccacacccacaatgacctccttccttaagctagtcttcccctgttagtttctatccaggccctgctaaagccgtccatcatgaattcatcagtggtctcatcctttgaaagatcaaagttctcacagtctagtcacttccaaagcccacatctgcacaatgttttggggactattctggctatacagttcatcggggatatttcaggttaaagccataatagtgaatatcattatccaaatctctgttttccttttcttttttttttttttttttttttttttttttttttggagggcaggtatgagagcagattgagacagggtttctctgtttagccctatctgtcctggaacttggtctgtagaccaggctggcctcgaactcggagatcctgccgcctctgcctcctgagtgctaggattaaaaacgtgaaccactactgccctgccaggtctctactttttataagacaattatcctggatccatacccatcctaatgactttatcttaaccagctccatctgcagagtgaccctgtttgcaaaccagatcccactctgaggcctcctaggcttgtctgggtcagccaaagtgcaccaagtctcctcactggtaccagtttgatttctgcttctcaacagatcacatcacaatgattcatgcttctagataccccatttgaagccattccttagggttaagtgggtgcgcctaacctgggcctcggttctcatgccagctcttcagaggtgccaccaagacaaggcccttcacaagcttgtgcacatttgccagcctgggccctggagatccttctttctgtcacatttttattttccttgtcctctctgccaagaaagagagtccacaggttaatagcaaaatagaagccatagatcagagtgtctgtgcagggcatgttctcttgaagacatagagacaaatagaaatctcagaaatacagggggcctttggacaccagacattaaatccatccatgcactctcactcccagggcagtgtgccaggaccaggagaaagcattttctggttgagttgaggctgacgaagcccgtgtcagagaaaagcagctagagatgaagcttccaaggcactttgaggcaggcagggactctccagagccctccagttctgaagggctttttagaataggagcttttaggctatattctaggagctggaattggaaaggaacctgggaagcttaatcaagggggacttcagaaatgtggccttaaagaagcctgtcagagaaccagaggcttcgtataactgaaaacaaagacccttgtggggtgcttgagtcctcagcctagaaatcagagttggcctacagacacttagcacagggaggttcacagaaccatctcttcaagtccatgaactggatatctgccttcagagttgcatgtaatgcagaattctgtgaatcaattcctaggacaggattcggggatggacaaattgagcccctaggcagggcagacaccaacctcaaatgcagcgctgcagtgatagctgggtcaaactcttgaatagataaaaagcccaagaacaaggaatactgctcactagcccaccctgccaagccaggtcccggagggccttggtcccctgcaaaggaaaggtgccccctttttctatagatagatgttaagtttctgttctcacagttgcatcttcaagaagagtggtccaaatgattcctggatgtccccgatggctggcctgggtccctgacatctgtcatctccttctcagctgtctagccaaaggcaaataactagtgtctccaagctcctttctttcaaacaaaacacttgttttcatgtgacatcctgacatggctttcacttggacagggctggtgatctatcctgtcaccataacacttctgaggccatgctggtctggtgatggcagcatcttccccatggcctccctctgccactgctccttgtggggaaggggagaatgtccagcctgtcaatatttgaaccactgatcacctgtgtttgggtactgaggttaggagacaattccaagaatctaaacctctaaaaatatgggaatgagccgggcatagtggcgcacgcctttaatcccagcactcgggaggcagaggcaggcggatttctgagttcgaggccagcctggtctacagagtgagttccaggacagccagagctacacagaaaaaccctgtctcaaaaaaagggggggggtgactggaaaggatttctagtgaaaggaatgaaagaaagaaccccaaatctccaccccctctcccagcccctgggcattggccactgcatctcccagcccctgggcattggccactgcatctcccagcccctgggcattggccactgcatctcccagcccctgggcattggccactgcatctcccagcccctgggcattggccactgcgtcttggattcttgggaagaaatgaagtcagtgcacccagctatgcagggcccggttaataatgaatgtggaggaaggagagaggatgttcaatatttaaacagtgcagagcgctagctgttttgccagttactgccctccgcctgtttcctggatggcctctgtaaaactgagtgctacccagttccactgctggcctctaccacctgcttatgtgaatagggaacagtagctctgaggcactccagccagaaagagttctgttgcttttcatgagaggaggagatgacggcatggggttgggggtctgtggtgtacagcttgtgtgtttagggttcacgtccaggctgtctgaacccctcacatcctcctctcggggctgcctatgtttcatctgtgttaggcttcagtggcctgactaatgaggaagattttacagggaaaaggtagacttgccttaagaaccatctcttcaagtccatgaactggatatctgccttcagagttgcatgtaatgcagaattctgtgaatcaattcctcttttcttcttgacacacgttatatcaaaagcaaaagcatccttctggggggaggagaaaagaaaacatttggcccgagacataataaaatcatgcttaaggatgcaacaaacttgaagtctcttagttaaaggaaatcaatacttttatgatgaaatattaatcatccttaaaaaaataagtcaaaactagagatgcacaagagccagagtgattttaatgcctcaggcattagcttggcatttgcaaggaagcacagagcacaagcccctccccagcctcatgagccacttgtggattttcgttcagagcacccgtatctctccatgacatgccaaagttacttccaagcatttccaaactgctgatttggggaaatgagaagtgaggagaagaggagcctgcagaagtgtgcacacacgcatgtgctgtgagcagggcaaggagagcctgcagagaaccagagagagctacctgtgtgcagtcctcctttgaaccaacagtaatgcccccatagcatcctcgtaggaggtactgaagcatgtgtaactgtttggaggcaggtcagactggttggattttgagttttacatgcatacagctgtcagacacacaagacagccctggtgtgctgaaagcaacggagcgggcatggacacatgaggctgagagcaagaactccattttctcactggtagctctgctgtaaatccttatgacaaactaggcatggaggaccctcctgggagcacctgggaagcagaggcaggatcactgagatcctgtcttaaaacaaatcctttagctcagacagttaaagttactttaggagaactttcagatctcactttagtgactgaagcctccagtcacatgggtgacaaaaggacggtcagtctcggtcatgtgtggtgttgcattctcaaaagacccagatcaattctcctaccacacaccccaccgccaagactgactaagttctgccttgataaggccagcttccagttcagcagtcaaaatgcaagtgcctggacatacagtctccagtacatgtgctctcagggcaagtagggcttctacatcacattacctaggagcagctcaaggcctgggaacactcctctccccctgtgtcgtttatctgagcttctgcttctccctggacttctcctttgcacatgacagatactgaccatctggctggccaagtgtcgtggggctccaggagcagaagccagcagagccctgcccactgagcagcagctgtaagcctcggaagcatgctctgggctggtggccatcttggcctttgtatgactcagcatgtcccctgatcccatctaacgcccaccgcgctgatagcatctttggttctttctgtattcatgtgtaaggcaacattgccatctgtcagtctggcctgaccccagtcagttaacacacacaggagagcttcagtggtatagctatagcaggagcaaaccaccctgctctataagcccaagtcctagcaaacaagtaaatgggaaggaaccccagcctgtggctgtctgccctgggggtatatcgtacatcttttgcagaaattaacagtgaattctctggcctctttgtattcttccaccttgtgtaatcctcggggctaggcatccacattatgagacctaccctacagtgctgccttgcttctggcctgagaggttagagcagggctgattagagtcttcagcaaaccaggtactcctggcctactccagctctggggacatccttgtcaggggccttcagctggcccacctgctctgtctctgggttgagaatctcccctcctgcctcctccacccaaccccaccccacccacatgcctacaaatccccatacagctatctaacggcctccttctccctgctctttcagccttgttcactgcctcagaacacaggcagccaagatggccgctggtggtgaactttctattgccttggctgagaggccgttgtggagctctgtgctctctcatgcatacatggtaatgccatttaaagtgggcagggactgggagaggcaaaagcccaggtatcctggggagaaagcccaagccctggtgccctatacttttaatagtctacagagcaccactgcagaaccagttcccaggtcctcatgccagccagacctccatagcaggtgctcctccaaggcaggggggagcatctacattcctgacatccacacagctcaggggtcccccagctgcaaaacggacacttggccctgaggtgtctcccatgggtggtggtccacatagccaggccctcacctgaaccaaagggctaaatcatattaaaatggcacagggaaaaagcagaatactgaaaaaaaattttctcttttctgcaggttttcacgtatagcccttaataaccaagaggatttgtccatggataaagagctataggctatcagattctgcaagttctcagatatttttgtatgttatccctttaaaaccaaccagaaataaaagcctttaagtgtttgcaggcaaagccagtcatcgagtcgcctatggcaaaagtcagaaagcagaaaatggtgactgctgtagtgttcccttcccctcgtttacatatctgctaccgccaccttccctgatacaggacagaaagtggcttttccactaatgggacactgggagaaaatcaaaaagtgatacttgagtgtgaagcccttcgggtgatcccagagttcatagatcagaaatcctgcatctttagacccactggagagagccagaaagtgagggagcaggggtgagggtctgtgtccaggatacccaacatgccaggaaaccctcaatgctgtgcccagggtatccacatgccaggagaccctcagtgctgtgcccagggtacccacatgccaggagaccctcagtgctgtgcccagggtacccacatgccaggagaccctcagtgctgtgtgtgttgctgaggttctctcactaagcacccaggtccaagtttgctccatgtttatttattattatttatgttatggaaggaggagtgtttgccacatgtgtgtgtgcccacagaagccaaaatgttagaccatctagaagtggaaatacaggtgattgtgggcctctcaacctaggtgctggcaaccagactcaggcctctggaagaacattactcacccttaactccctgagcttttgtctgtctaaccccttgttttgtttatttattttagcattttacttgtttagcagtagatgactgtctgtgtgtatgagaacacatgctcagaagccagaggagaggccattgggtgtcccactgtaccactcaccactgtatttccttgaaacaggctttctctctgaggctggagctaggctgtccccagcaagggatcctcctgtctctgacaccacagcagtaaggcacaggggcacatgcagccacatgcagcttttttatgtaggtgctggggactttaactcagatcctcatgctgtatcaataggcagcaatcatctttacaggtgagctatctccctcattcattcattcattcattcattcattcatttaatgtgttctggtgttttcctgaatgtctatgtgcatgcctggtgcctaagaaggacaaaaggtgtcaaatcctctagaacttgagttccacatatttgtgagccaccctgtgagtgctgaaaagcaaacctatgtcctctggaagagtagccagcatctcagtgtgtggtaagagcagtctttaactcttctgccatctctccaggtggcatcacctctgcctaaggtggctttcctcaccttctccctgattggctccccacatccaccctcatcttatcgaaggataagctccagagacatactgggtccgacgcatgcgtcagaaaggtccatgtcactccagaccttgtcagcagcagtacagcgctgtagccgactgaagtattaggctctgtcatatctctacccagttcacccaagggacctggcagatgcagcagaggtgaaagggcacagtcaaggcaagagccagtgagggagaagcagggctgtgcaggatggctgtcttgggtttgtgcaggaggtcacagggctgattgattttttttttttttttactgtttcccagcatctcagtgtgtggtgagaaaaatatgaacactgtctggctaggagcctgagccctggcctcggagtgaatctgccaatgaaaggcaatcttgggagcctgtggtccttagctcccattcacagtggcagccctggcagccctggagcctctccctcccaggggactctggggacctctggcccaggcagagctcttacctgtgctccaagctcacaccacccatcacaggagctgacatttcaggctcaggattgagccaatgacagcccagcacagtacaggatttatgtacagacaagaggcaagctagctttgccccacccccttaggtaggccacaccttgtttttcaaaaagagcagaaaggctggggctgctgttcagtgggatgcaccagcctggccttcacaaaaccctgccttctgtcctgcctgtaatcacctcactcaagaggtgaaggctgaaaagtcaggttcaaggtcatcctgggctacatagcaagttaaaggccaccctgggagaaatcctgttctgaaagggttggggcaattttggaaatgttatttccacattttaaaagttcaggcagtgtgtagtttacataaaagtccagatagccaccttctttggaagaattggaaatgtacacagagtggggggtcttacactgatggtctcagcccctgatatctttcaggacccagggtgttaacactgtgttttcctgatagaacagaaggctttcttagcctccaggtctctgtggggtcagggaagcctcttagttcttcccacccttcccaccctctttcactttcacagccaaacttgtactgtgtgtgatctctaccagtgggatccacagaaaaatctggaaaaaaagcagggaagccactctctggcactgcagtgcaccaaccagagcacttcctttttcactcttgtagaaatcacagtgtcactgcttagagaagtaagtttgatgaaggccaccatgtggtggcttctcggcagaataaatgagacactttctaaaggcaagcagctaagtctcctctgctgctctcggggacgtgccaggagagggtcaagggatgcagactctcagtgaccagtgggtcccaagacttccaccatgctatgctttccccctaagctggaactcctgagaggctcaagctaaatgtgctgttctgtgacagaagtcttcctactgtcactttgatttggcatgcagcccgatgtcggtctagtactagctgcttctgttatagggcttcagggcttgtttctctggtggtgggcttcagttctcagagggatacagatgtatgctgggagcagcaagccctacaagtctgtgggtaaggatagagttaatcctgaaagcagtgagcccctggtggtctgccaggtgtagccctacattacacagagtaggagctccttagaatgacacttgagttgagcaggcttctgcacttgaccttctgagaggcccctgtggaatcccctacatagactcaagccagttccataattccaaaaaggcaaatgctttttaacctggaacacttatattttagtcaaatacccagaaggcaccaccagcccctgctttcttggaagattaaaaaagcttcagcccaggccccagtgtccctgtctgcatactgtgcagtctcttaccgccctcaggttcaaggtcttagtcctcttttagaatctttgatttctggtttgaactcagaaagaaactcagtccatccactgggttctaccaaaacctccacttacatcatggaaggaagttgaattcataatcaggatcacttgcccctcccctttttcttcatcctaccatgtccagatccctgtactccaccagaactaccagccccataggctcagggcaattttctccctaccagaagaaggtcagagccagcataccaatatgaccaggggacgtagcctgtatcctgcattaacaaggcattcctcacaatatcagataagattagcttcaacaacatagaaaatgctagaagggaggtttctgttgctctccagtgacagcttcatgaatatgggtaaacaagggatccatgaggcatcagagaccctgctcctctccactcagtgttcttccttccctcataaagagttcccctcttagtccaggatgactgctggacttctgtcatccgtgttccaggaagcagaatagaggatgtacctaccctctttcctgttgaagaagcttcttggaaatcccacatgccactttgatgtctgtctcatggccacaactcagttataaggccatgcctagtggccaggttctgtaactgcaagtgaagggagaaatgaataatagaaataagctagctatctcagaaacacgtccacagggttcttgctgcttaagtagtgaaagctgttacccagaacactagtcatctttgcagttgggtttctcatacactgcctgagcaggacagacttggtggggtattggggggaaacctttgcccaagctggcagctagcactcaggcccaacaagtgccaaggactgcaggccagcctgggctgctggaaggaagcgctgaagcagaggtaaacaggaatggactcatcccacctctcaaagccagagtggacagaacttggacttgaacctgggatcctgactccatgcccagtattccctgtcactgggcttaaaaatgggaggcttcaacatccttaatcatcagggaaatacaaatcaaaacaaccctgagactccacctcacaccagtcagaatggctaagatgaaaaattcaggtgacagcagatgctggcgaggatgtggagaaagagaaacactcctccattgttggtgggattacaggcttgtacaaccactctggaaatcagtctggcggttcctcagaaaactggacatagtactaccagaggatcccacaatacctctcctgggcatatatccagaagatgttccaacaagtaagaaggacacatgctcaactatgttcatagcagccttatttataatagccagaagctggaaagaacccagatgctcctcaacagaggaatggacacagaaaatgtggtacatttacacaatggagtactactcagctattaaaaagaatgaatttttgaaattcctaggcaaatgaatggacctggagggcatcatcctgagtgaggtaacccaatcacaaaagaacttgcataatatgtactcaccgataagtggatattagcccagaaatttagaatacccaagatataagatacaatttgctaaacgcatgaaactcaagaagaacaaagaccaaagtgtggacactttgccccttcttagaattgggaacaaaacacccatggaaggagttacagagacaaagtttggagctgaaacgaaaagatggaccatctagaaactgccatatccggggatccatcccataatcagcttccaaacactgacacctttgcatacactagcaagattttgctaaaagaacccagatatggctgtctcttgtgagactatgccggggcctagcaaacacagaagtggatgctcacagtcagctattggatggatcacaggacccccaatggagaagctagagaaagtacccaaggagctaaagggatctgcaaccctataggtggaacaacaatatgaactacccagtaccccccagagctcgtgtctctagctgcatatgtatcagaagatggcctagtcggccatcagtggaaagagaggcccattggtcgtgcaaactttatctgcctcagtacaggggaacgccagggccaagaagtgggagtgggtgggtaggggagtgggtgggggagcgtgtgggggacttttgggatagcattggaaatgtaattgaaataaatacccaataaaaaaaatatggaaaaaaatgggaggctgaccttttggtagtgattttgttcttgacaaatgcgatagagctatccattcattcacagttcccaaatcatagcagaatggaatagaagaagacaggaaggctccggctgcccatgcagctcagagatcctgcaaagcaaggggatgtcttgctgttggcatgggtcctactgcctagccctgctctgggaaactttgtccaggtctcaagaactcacagggagaaagcttgggagaccagagtggctcatagttggtggtggtgctgggcctgagtgtgctcagctcccagggatcctatttctcttctaccttcttctttcctggtttgaaataatgttcttagggctggagatatacagtgcttgtctaggatgttcagaaccctggatttaatctcaacaccacataaactgggtgtggtggtaccacaggcctataatccagtcctcagggaagtagaggcaggagaatcaggagttcaaggtatttccagctgtttccagtgaggtcaaggccagtctgagatacattaggacccctatgtcaaaataataatgattcatggtaaggagcttagaaaattcggacaagcctctcaaagacaataaaagcctactgtaaacctacccattcctctcaggctcagccctgcagctggtcgctctgctctggacaggggtgagggaaagcctgcagtcttctcagtggagtatgcggacatacttttgctaatgtttcctcacttgccacatcttgagcacttcctaagcacttaatcttcccttccgctggcatgtttgtcaactggaggctttcatcaatggcctgtcagaatccactggctttcctccagttctggagatatccacatcttacatccctcattctacaccctttcaccagcattcacaccccacccccatgcccaccccccgtgactctagttcctacacacagactgggcccaaaggcttgcaaatccccacagcctttggtacacatctaagagctattcttgagacagacgtgggagggggatcttgtcatcagcagagaagaccctggggagcctgtgtgcctgttacccatcccataatctctaggttgtctgtgtgtgtttgcaaggacttggcagtccttgtgggttgacatagacccagaaggcctctggcatccctgctgtagttagctcatctagaactgccttgctgggatgaaacaagaattctgaggaccagggctcagccatgccattcacctgcatttctctctagtacccacctaatcccccagtttggcaagttagtgtggaagagagccccttgaaattgcaacatacagagaggatgaagaaggagggaggttcatgggggggatgcattctcagtgcctctactcagtttatgctgcaaaataggacagggttggaaccaacaagccaatgacatttcagtgcccaggtcctacacaatagaaggaaagagccacctcctgcaagttgttatctgacctttgtaggcatgctctaattacatgtaaattttattactagtctattgatgctgacccccaaattaaagaacttccttttgtcttcttttcaaaagagcatcctgggtacagaacccagggcaacctaatatgctaggcaagggctgtgccactaagctccacccacccagcaaagaacgttagtattcttgctcatccctcatgaatcgcactctaaatatgtgacagtgtctttagagacagacccccctcagggtcccagcttttcactcaccatgttcattcaggagcacacgaagtccagtcgcaacactgctccaacactcagcttgtttgtatgtgtgataaattggcggcttgggaaaagccacctgacattttgatttgttacagggtaattcatttttgaggcaagtaaacagcttgtaaactcaggggtttaccactgtacgtgattaagaagtaagcagcaataaagttcactgcaaagctgtggctgattgtccctgtggaattctcctgagcagtgttgggaatctgtcagacattctctatgtttcctctgccggcttttcctgccagtcagtcaatctctcagtgtagcctcatggggtctggagcctggtggtactgccaatccctctgtaacagccatctgaggtacacagtaggtgaggacagcaagcactgaccaccagaccccagccacctgctgttgccatgacacatgtcacctggcccagggtatcagtgagcttggtcagttggtaacagtggttcttcatgaacattagtatataaatcgctcctccttggtcaggtgtactactgagtctacagagaaggagtgtatagagcaagaggtcctgactatagtgaagagaaggaagtgaggaggtataggactctgcctggaccctccactgaccagtaagcttcccaggggcaagaaccttctctaccctttgtactgcatggagccaaacacactgcccccatagaaaaccagaacacaacattttatgcttttcagacaacatggtctccatggcagcgactctactctgtgtaagccagttgcattcagaacaagttccaaactttgtccatctaaaacattactgtttgtttgtttgttttttacaagatttatttattgttatatgtaagtacattgtagttgtcttcagacataccagaagaaggcattagatctcattacggatggttgtgagccatcatgtggttgctgggatttgaactcaggaccttcagaagagcagtcggtgctcttaactactgagccatctctccagcccctaaaaccttacttgatgagttagttactccttgtgctgccgtggcaagcagcttaaaggaagatagatttagaccatcatagtagagaaggcccgatgaccagaggcaggaagctgagaggaatgctggggttcctcttgacttctcctcttcattcagtcttggacccctccccatggaatggtgcacccatgttcagggtgggtcttccctctctgagagcgccctcacagacggaagcagagctgttgccatggtgattccaaatctagtcagatctgccatcacacttacctaacaggcagtggccagcatcttccacctttctatgttctgtggaagaaaggctagtcctggagagccttctagaggaagtgttagcaggagctagaccaggaggttccagcagtgcaggagaggcagagtgaggctggctgtgctcactgagagtaaccatgaatgtcagggtaccccttctgctaaaggatttgttcctgaccccatctcacctcagaacagcttctggattaaggggcagaggcaatgtggtctgcagagcaccagttcctggggctgaagcagagcccatatgtctgcatgggctgttaggattattgaagtatgtattccttgggaattttcatgtttgtagaggataaaatcagatgcatccgccctttggggggtgcagaagccccactgtggagagcatgaggcagggggcagctcctgggccatcagcaagactgggctttgtcataaagagattggggtttggttatttgtttttgttgtttgtttcttttttaagacaaaaatctctatatatagatcgaaccagcctcaaattcagagatgtgcctaactctgcctcgtgaatgttgagtgcagggataaagctgtgtcccagctcacctggtataaagaacccttttaaagttaagatttgttttcactgtgtgactgtgtaccatgtgtgtgcctggtacctgcaaaggccagagaggacctgagatcttctagaactggaagctcaggtgagcctctgagctgccatgtgttcccaactgctcagtcatctccagtcagcagagagcacttttaagagacattgctatgtcccctgcctgtgctgggcctgctgggaagcgtctccccatcttcctcatggttgaggccatgagagtgaacaaccagaaacagactgaggggccacttacctgctgttgagaagtgggtttcaccatgcagagctaagtatctctaagcctgggagctaggcccttcccgtgttgtgtggccacaaaccacagagcctccacatctgtgagtgactctgaggtgggctgttggtgactgtcgctgagctcttctgcagagccctcattactcctaaacctgccctgccaggactgccaaggcagaacgggttctgggaggggagacaccaggctctcagttgctggtctctgtaatacctttgcctcaaagcatatccagccactgtgatgacccaacaggcaccacagccttgccttggcctggtcaatggcagctgtttctgaaaacagtttcacacatgcccagattagcccctgaccaaagaaatcagctcgttctggcaaacatgccaaggctcacacagagaaaagtccagtcgagttgtcttgacattaaagcccccatgctgcctctaagacaaaaactggcctcccagtgtctccaactcagtatgggaggtggccctccttctccaaagcctcccattactcttctaattaatgatgttgctctgttgtcttgcaggctttgctgtggcccagtgcataaaccagcatagctctccatccctgtcatcaccgtcgccaccatttgccagtgggagccctggtggcagtggaagcaccagccactgtgactcaggaggctcttcctctgcaccctcagcaacccagagcccggcaggtattggccatgagacgtggggggactttgggaggcccttgggaccctgtgaccccttgtttcgactatgacctctgacccacagctcctcctcatggtgtcgggaagatgttgccactcagtggtgctctctatggttgagcaagatggcattatctaccagctgcattcacttatcttggatgctctgctctgctctgctgtgaccacagagctatagggaatggcaccagctaggcccagcctaagtggcatcacttctgtgagtgtcacctggaggggtctctcacagaggattgtgtgaagcctgggagaaggaaaaggcatcccttctaattgggctccagcatcaggtttcctctctctaagggagttcattaggatagagcaaggtcaactcttgctggcctttaacgtacaccagttcgaaggccataaaaagagtccattaagaggagttagactgtaatgcctcagcccacctccacctgccttgtcatgggctcttgtgagcagcttgcacacaggtttctgtctgttctgcatcaagtcccaaggaacagacatcaggtttgtttcctgattagcatggccctaaatgcagctaaagtggggataagcccagtgtcccaggcagtacagggcttcacacacccagcagcactcagcagcactgccccacgatccacagggtactcatgtctctagcctgcaccctctctgtgcccttatctgtgcctccaaggtctgattagagccccgcccagcttaactcccagggcacctatccgtgaagaaccatgaggagaggccacacctgccaaaggccgtggtactgtacccaccacaggtcccagtgtcttcctgcatattatacttccctcgctgacactttcagtttcattttcctggtagttgattaagtcacccttgtacccatgcctatgacttaggggatcctagcccacttgtgctaccctaccccaacaaggtacttgttcccatcccctgttgatgtcacaaggcccaggcaagaaggtcacccttaggcccacctcactggaacctcttccaatgtgctgtcagatcctctccttgcccccaggctagtggggagtaacatctggactcaggtgttagctaccgattgaagcagttgctgagctacccccagaagcacatccaggaaatgcagagggggcatgcttcaaggctaaggccacctctggaatcctatttttggtttcaccttgctctgggacaggagtgcagggttgtatatccatgtgctgtgttcatgcacttgctgacatgcacatttctggatctgcatttgagcccactcctgtttgccagcactcctaggacagaagatcttttctacatagtatagacacctttcttccatttttgaggaggtagaaccaacatctaagtgagcaggtagccacacacttctctgcctaaaactaaaaccaagagaagccttacactgtccaaatcaaccctatgacatgtgctcattatttctaccttggcctccctcagcccccatccctactattccctgcccagtgccaacaacatgtctttgaatctcacaaatccaggggccattagcctggctgtcacatggccaggcagttctagtgaataagtgatagtcaggatctctaaggtgtctgctccctctttgcatcccggcaggcacaccagccccattttttatgtgacatgacagtaaaagcctgagcctggctacccatccacctctgtccactccacaatagctcacctcttttagagaggctgacctggccaagagctcggcttcattcttggggagggaatcagatgttctgagacacagctgttggtcctgagaagagactcctagagcccacaagcatctccacctcagtgttccagtgtaggttacgccttcgatccagaaccaagtgcatgctttgttcctgaaggtccagcctagccagactgtacctcccacacctattccctatcaggctgtgctaaaggactgccagaaaccacgtgtcagagtttgacactagctctaagtggtattgcagtatttaggaagcagagaatagcctactggccagtttttgtacctgacagggctgccaccatcaactagaggtgctgtcctcagctagccagctggtagttagatgaacctgaggagccagtccccgcatcatccgtatctgcctgctgcccagcctaaacagcatggctttgccaagagtccatttgtcctcagagtagttttgagggcatggtactaactcagagcactgctgacattttatttactaaacctcccagaggccagggagctgcttaggttagagagcaatggccaggctcctagaaacaaggaaaacaaactccagagactcagagacaccagtgtccactgcaaggccaagtgtctgttcaggaaagtattgattgatgccagcaaaaggccagtttcccacggctgctccaagtcatactcaaatttatacaaggggcacatcacaaaaatacagctggtgtaagggttagggatgggtagtgtgatagggcatctctaggtcccaatacctttccgttgatttcaagacagccagaagaacagattggaatgttcttgaaaacaaagaaactctgtgtgtctgaagtgaagaccatacaaatagcttcccaaaccccacaggtgacagacctgccttacaccagttaaagagccagtgaagactcatgcttttctagcgtttcacatggcctggacactcatggtcagtgtgggttcctccccagcccatacatggtcaccccgtgtgtggtgtgtgtgtgtgtgtgtgtgtgtgtgtgtgtgtgtgtgtgtgtataccctgcatggtgtcctagggctgggcgccttacctgggtgcattacatccacacctccctgaggccttccctactctcctccattggaaagtgtaatggttctgacagatcatgtgacttatctgccatgctgccattagcaggtaggagaatccaaatgtgaaccgtatccttggtgacggcatagccatgttctgccttctaaaataacccagcagagtacgggacatgcccctgagtcttcctgggtatcccagggtgataccatgagcccaggtcatagtttgagtcctgactataacaactgtcttacagccgtccttcatcatacacagttgcctgtgggcccagcttcaaagccatggtcccactcaccgagcctgggactcacttagtccaggtagcagatgttgggccttatgggtcccagtgtgaggaaagcacagtagagcccagaaagccacattctcttctgattcagggttatccccaaactgagcatgagaccggctgaggctgggaggattacgtgtgcatctgctttgtcccgctaactgacccatacttcctgtctgggtctgaaagagacccacatgtaccccaggatgggcattctccgtttctcgtggggagcttcagcctgtgctcccaggcaccagtggtgcaggttgcccatcttggttagggagcctcgagacctgacccaagacattcctctgctagacgggcctttcacttgcaggcttctccctggcttcctcactgtgctgtctctctaggtagatgggttcgtgctgagttcctactgtgcacatacattagggacaccaagtgaccaagtatgttctcacagatgaacagaggcaggccaggaccatcagatcaccacagaggcatgtgtgcagttgaaacccacaatgagggaccaagcaggggctccaccagctggcacagaccagctagagaaagttcttgtattcctagagacaagacccagggagtaaatgctgcaatccaggggcccctaaggaacgggcgtctgaggctcatacaggtcggcctgtgtccatacctttatcttgttggaagcaagtagattccttttccccatctcccaaaagctttcctgcaaaccctgcccttctgagtatagaagggaggcagtctgtctttgagaaacagctcctgtgccttatggccaagacctctggccagaagtggttttagagcctgtaggcccggctcagattgggaccacagccaagaggaagggtgcccttagcagtcaactagtgtgctattaccagcagtgcctgctgtatcccctttctgccatataaaactaggcatattccaagtggctttttaacaagggctcaaattgggaacccacagacaccccaaactaagagagaacccatacagaattccagactgcctcaggaaccagtcagacagtgagtgagttttgtgttcctggtcagcctttgcctatcacagctacactaaagggtcttgcagggacttgagtggtctgctccagcacccagtcacactcagtctgtttgcccattgctccttcttgtgtcttagttcttactttttgcaattagtcttgctgtgttgctcagactggcccaagtgatcctcttgcctccgcctctgagttctgagactgtggcctctgccatgacacccggctccactgcacttcaacaaaagtgcttttgggtggccagcccctcaacggagagcttaacaccacgtgtttctttatctgtcccaggaaccgagtgactcacgtgtctagctcaactagatggcaagcctcagcttgacccctggtgagaaaaggcatcaggctaggtcaacactttctctgtgaaatcaaacgcagtagcatggaaggagtcagtgggctccttatcagaacagtgtgggcccagtgccctgtgcaccctcatggtgccgcgtgcacacatatgagcatgtgtgctcagtgtcagacccggttgtatacactcacattctgtggagttgtttctgagacaacaatgaaagtcagactagcctgggactgatgctcctgcctcagccgtcagagtgctgagatgacactggccaggatgcctgtctttatggagtcctgatgaggaattgtccctcagatactggtcccacgatgtacctttagttccttgcatttctggcatccatgtgtgccagagttttagagtttctttgtgagcctctttgaggcagaaaacagggagtgtttattggaaatgatgctggggagaaggtcaggctgcccttgcaagtgtaaatgtcactctgtgcacttacagccactatcccaagggctgacaggaaaaagaaagggacggctcttggggcccaggcttgagagcctccctgatctccctccgcaggctccctcttcccctcagcctctctaagcatcctgcctaggtttttacactaaggttctgatcacccagtccatagacctgtgtgtgtgtgtgtgtctgtgtgtgtgtgtgtgtgtgtgtcgcgcacgtgtgtctgtgcacattttgaggtggtaaaatacagccaacataagatggaccagtgtaccatcctcagcatggtgtttgcgcatgctcccgctgggcttgctctgtgactttattcttagctctcctcttagagtttgtctctgagaccaccaccctaagaacactgtgagtcctccctcttgttcctggtccagcttgtgcattcccacttagctaccaactgcctggtctccccatttcctgctctgtgccctggtcctggttccccaagtcatggttccaaagtcctggaactttcccaagtcatccctctccccaaaacaccactgaggctaaggcaggagtcaggtccagcatccaggattgacttcaaacttgaagcagctccctccatgtcaccctcccctgcgtcagaaatgcttagttcactctggcctggctctgaccctctgaccacacccctccttcctgcaggcatttcctctgagtttcccatcttcctgcaggtcccagataaaactgagaagcagttttatccttttgtcccctggtttttctgacaagaccagaagttatcagtgacccaaatctttgcacaggattgagccttctccgtctctaaccatattaagttacaagagtgagggattgaagccctgtgcttgcctggcatgcacaaggtctgagcccaggcccacataaagcgagcctcgaggtactgcttgtactcccaacactcaggagctagagggagaaggagcagaagtccaagctgtcctcggctacagcagagtttgaggccagccctgactgagaccctgtctaaagaagaaaagaaagaaaagttgcgtaaatgaacaattattttccttagctctcctgaccttggctcgtcttggggacagcatggacatgtcctgtctacatggtgggctggcagtctgggttccagctgaactgtagcccactgcagccacagcccttcttcctttgtccttgctaatgctgtgtcggtcgctgctgtgtccttttcttttccacctcaccttcgccgttccattgttacaggctttctatgacctgtcgctgtgttttccctctagtcaggagtggcaggaaaggacgccggcgtgtgttcagcctgtcggaggccgacagtcacggcggccactgggtttagtgcttcgaccaacagctgccacggcaactcacgcacagtcaaatcaggcaggtctcctacaggagcccccatgggcccacgctattcctgccacatgtaacagggtcagcatgagcagggcgggcaagctgggcttagagaacacgccatcagatctcagcttcctctccctttctgtcctcagccccagccagtccttcctgccttatatgagagtattgcccttgtacagcaatcaggctccaggcagcctctccagagtcagccctgagctggaggccatgtcctgtatgtccacacaaatccctgcagtcccactcactattgactagggaattgaaagcctgcaaaaggcagcctaggatgttctttcccagaccttggcccaagctaagcagcaaatgcagctactagcatccaggcccagtgtttcctccttggtagactccatctttccagtgctcccatcactgtaagcgtcaccagaagaggtgagccggctctccttgtcagggccactactgctgccatcctgggacattctcctgcttgctgacatgtccatgtgctgacagtgtgtgttggcatcagcccttcacttggctttctgttcgacagctgtttggagatttgcatcagcttgctacatggagcccttccttccttcccacagcacttgcctgccagtccagcctgtatacaaccagtccacatcatttctggaagccatcacttactttacaaaggcctttgagagcccaccctaaagcagcagatcccatctgaggggctcagcttcctagtactctcacaggcagaggctggaggctccgcaaccctcctgggaacacaagcttgctgtggctaccactcttgctgtggctctctctgcctccccagctcatgcccaaacccctcttctccagtcccaagtatgtagcctttaggtctggaagcctcagcaaagcagaggtgccaaaggtccaccaagtcacctttgctgctcaagctttgagcagagcatggcctctctgtgccttccttgggaaacctgccctgcttctctttctttgcccccttggttagataaatttgctgcccattttcaggaaataatttccagtatagacagcagtagaaggtgggagcaaaaggacattccttttttttttttttctattaaaataactaggggtattttttaaagtggaaaaaacagcccttttaacaaaaagttgctacttttctaaagcagccatttgtgtggcattgttggttattttgcttttttgatggatttgaaggtgtgtttgaccatggtctccctgccttcatgattattctcatccgcaaaagccccactagagaaccaggaaagaggtaagaacccaggaaggcagcgtttctgtccccatcaccaatagcaggacaattccatttgcagcgggggtcatttccaagctgcctagtcacagcctctcgtggaggccttcccaggcaggctcagacctgtcccaaaactttgaaaaaggtcactgagcagctgagtgccacttagacatggagggttcacacagggtcacaacaggaacctgaactaaagccagcccagctcccaagcatggctcgtacagtgagacaagtcagtagttagcggagactgtgagcagcgagggacggcggtgtgagcacagcagtctgcacaacagacacctctgtctctttttgcaccagttctcactgacacccacagcccccaagcaagggcgggcccaaagccatgggaagtggctctctctagactcctgctctctccttcctgtgttaagaaaggacactgggtaaaggagctcctgggcaaacatttggctagcattgtgcctgaggccctgggttccatccccagcagtccaaaaaccaaagtacagctcttagaaggaacggaactgactgacccttccatcttcccagagtccagaaggaaggcacacggcagcatgtgctggcgtgctggctgagcaagcgagcgagcgagcaagcggcatgcgctttcctcccctttggctcccctgcttgccaccattcctcatgttgcctgcttttattctgttcttcgttcttccatcctttggctctgtgtttggtttgcttttctgttttattttggctttagaaaacaaaatgaagtcaccagaataacattgaactaaaactacatcccatctgccccaaatcccctcatgaagctctaggactgaacagttgccatcttcttcggaggcctgttaaccctagaatccatacagatatgaacgtgtagccaagccacatccctagcacctcctctcggggtcttaaagtccccaggctgaagtgctgaatggctcttcccttgaatgccacacattcctggctggcatcattgaaaagcaagtggcctgcatctatccagtctccaagggtttaataaagaaccaaacaaacaacaacaacaacaattctacactgggtgctcgttttggcagcacatatactaaaaattccacattgggtggaggctagctcagtagtggccctgggcaagcccatctgcttggtgggtgcaagcttagtgcctgcagaaggcggaagctcacaacagtacaagattttagaaactagaacattctaccttttaaaaaaaaaaaaaaaaaaaaaaaaaaaaaaaaaaaaaggctgttacactggattccttggcaaatatctccaaatgtaggctctggaaatagcctgggattgtagagacgccccaacctgtttgctttcagtttctgtatttaccattaggcaatgctccaaactctctgcctgcacacagagcctgcccagaccaggtttcactttcagtattcaggtgttgatttcagacaaggcctgagttttcacaagtcaggtacccaagatcctaacacactatccctaggcctaagttagatgaagctaggagcttctgggtcccatcaaggagttggtggaacaggcatgcccctaatattagcagtctccccacagagttttccaccctggtgcagtgcaggagtggcaggtgccagctgagtacagtgtcactggagctgagagtatctctgttttccttcccacctagatgcccccacgactccagaacagcctcagcctcacctagaccagtcagtgattgggaatgaaatggatgtcaactccaagcccagcaagaactcatcggccaggagctctgagggggagacaatgcacctgtcccctagcctccttcccgcccagcagcccaccatctccttgctctacgaggacactgctgacacactgagtgtcgagtcactgaccattgtccccccggtcgatccccacagcctccgagccctctctggcatctcccagctccccacactgcctgcagcagatacggagaccccagctgagggtgctgtaaacccagagcctgcggaacccacagagcactgagtgcgccagagctctccctttgtgtgtgcggcccgctggtagggaccccccatgcattttgtgacagcaagacacactgggagcacccacaattctccgtggccctgaaaactgcccctcatacctctccctacaagacaaccaccaagcactcatttgctctgacctctcgctgagcaggctgggatcctagaaacggcctcctgtgtagagacgatggcattggccacctcagaggggtctggggccctgcccctgatcctgacagccgcagggggcaggacccactggcaccgtcctttgggcagctcctttgtcttccctcccagtgtgcacagaagtggacaaggttactctgggtagaaacctgtggagaagcaaacctagataagcatctcctcgagctagttatttctggttttggcaacaaatgaagagatttattttaaaagaatctattttggaggaggggcaaaaagaaaaagccctcaaccataaggctcggagtctcattagaagtgtcagctgttaaggttctctgtccttagaacttttccatgtttttattctgaagttgtggctgtcacttcctctgttttcctgagtgattcttctttctctgtccccaactctacaagcctgtggggtgatgatgtctctccctgaaacactgaggtacttctgaacaagatgagagagacctgagtccgctcaggtcacatgggtgagaaggccaagcctctgctctcgcgtgacctggatgacgtctgttccctgctcaggacaccacacagacgctgctccgagcaggcacgctcccttctctcttcatccaagaaagacccattagccagtgtccgtgacagaaatcaaaggatttaaggcacagaaagtcatcctcagatataatctgcttcccaagatgcaagtggatgcccaactggggcccagctgcaaaacaggtgaccaaaagcagaatcccaccctccccctccctnnnnnnnnnnnnnnnnnnnnnnnnnnnnnnnnnnnnnnnnnnnnnnnnnnnnnnnnnnnncaccctttgctgcttccacgcagtatgaaaaccccatagttgtaggcatgtgccagcaaggaacagatctgtgccatcagcccctccctcctctgaactggccagccaggtcactactccaggctccgtggcgaggccctctatggcttcctacagatctggcctcacccagtttcagtacccaccaaaggcgagccacaagggtaccccatacattaccatctgctcatcattagaccctgacactctgctaagctaacttccctgcaggccccaatgctcagttttccaagagaaagcagtgctccctaggaaggtagtggaacccatgtggactggcttctctggtctttaaaagtgctccagtgggcatgctgtcaaagacaagatgttttctaaaacagaaggctgggtcaggaagtcaaccaatcttccttagaggcagccactccaaaggccctggcaaagtaggatgttctaggatgcttagcccctgggaagagaggaaagtgatggccactgggaacaagagctctgtggaccccacagccaaccttgggtgttttttgctcatttgcagggaggggtagacaaagaagcaggctagccctgtcttcagcacaactgtacactttgggttttgaaatgacaattgctagggtcagcataaatgttacacaattcaagtgactctctaccatgcagtgtggtctccagagaaaagcctacagccaccctaacccacataaacaggtcagccctatccttctgtgactagcctcctctttgcaatccggaaattttaaggaagggaaaagattgtgcccatggtgttcagcaaaccctgaaagggcaactgctgtgtaaaattcaccaacaataagcctgttcccacagctggctttaaggttgctcccagagggttcctgcaaccaggagcctagggcatacctccaagtgagcaaatgtggacttcctgtgagcagaactgtggcccattgctgatggagggatggggtcctggaggaagcaacaggacctcaggactctgaagaaggacactgtctcacctaggtgttggtggcattgggtacaacccagtcttcaggagtactctgctaacttggcaactgtgctctccagacagacctaaccagcaagaacctactgggtctctgtagaactgagggatctaaggtccagtaggtcccacagctcctgacctggaggtcccagagtcagcctccaaaatcattgctcccatctcccaggccatgcatgccacgtctgccctggtctccctcccttcttcaactgccccagggcagactagcagagctggcctctaacccatcacctcagctttgaccgtcaccatggcaacatgcagtgctgcctcctccctgttgaagtcttaggcaggtgggacacttcccacaggtcagactcagtgtggtggtgagcgccctctatggtggaagtggtgaagaggcttcacctgctactctacccaccaaacacttgcattggcaggagtaggctggctgcatcctaaggatggcattggctttctctgtggcctctgacgtgcagttgtaaataaggcatgggtaaaccaagtctgatcttttgtagatgcaataaatatatttcacacagtcacaatgggcagaaggttaaatgctccttccctccctcagagctgaagctgtgaggaaaaaagagggggagggggcagaactgggaaggtctggccagggaagtgcctgcttctgccagcaggactcatgctttgtggggactgaacctgaggggaggaatggaagctagaactttcttgtaatttgaaacttggcaataaaaagcaaaaccaatggcccaggagtgtggcctgctgttcctcggcaccatggtggaggctatgctacagggagggtggtcaccaaatgccttgacctgtcaacagtgcccaggtgggacataaggactagagaccccactgacatcctcagctctgtcctagctgggaaggacctactcatgaagggggacagaaccttgagttgctctgcctcggctccttcaaacctagtgctcattctatatatatatgatatgggctgctgtggccctgcctgtccagatggggcaggaaagacctggggaccaggaagggctccccacctgggacagtcaggtgacactggtgatcacagttcctgcatacaccaacgtggaaatccctgggttcttctcagcttctggtccagcttgagtctatcccagaaatgcctggggcctttaagagtcttgagagcaaacctagaagaagaagctggactctctcaacctcgatccaagtctttgcaggagaaatgaagcccagccctgaactggcagccagcagaggctacttccccttctggactgtggttgtcttaattccttggaagtccagccatgatgtctgcgcctgggaaggctctgaagttctttgattggggtggaaatctgctcaccactggacatcagccaaggcccacctgcatcctcttttaccccacagcagccctgcttggttctgtgggcattcacatgtttcagtagcctcagtgacctcaggatggacagaggccaggaataatagttttcagggggctccctgtctatcctggatctccaagtcaagaactaggccctcaggggtgtagagacccaggtgagggtgggcaagcccatacctcatgccgtcccttattacagctaaggaaagagggggatctgaaatctgtatggcagagatgcaggtccccgggctgggatagtcatgtatccacttcacagactttggatacatgttagaatcatctggaactgaagcccggaactagaagcacacaccctggtcatcagtatgcagaacccacactgagcccttcgcactgtctgggcccagaggtggcctacaacccatcttacatgggggtgtgactggctctggctgtttgcggctaccagcacccaccctcacagcctccctcaggcccgcagcagccctgctttgggcatgtgtgcacttgcatgcttagtagcttcagtctagtgaggagggaatttactgtaagtaaactcagggaggtagcttcaaagttggggaagttaggtgactcctagtcagtcacagctctgtgtgtgtgtgtgtgtgtgtgtgtgtgtgtgtgtgtgtgtgagagagagagagagagagagtgagagagagagagagtgagtgtgtgtgtgtgtgtgagagagagagagagagagagagtgagtgtgtgtgtgtgtgagagagagtgtgtgtgtgtgtgtgagagagtgagtgtgtgtgtgtgagagagagagagagtgtgtgtgtgtgagagagtgtgtgtgtgtgagagagagagtgtgtgtgtgtgtgagagtgtgtgtgagagagagagagtgtgtgtgtgtgtgtgtgtgagagtgtgtgtgtgagagtgtgtgagagagtgagtgtgtaagtgannnnnnnnnnnnnnnnnnnnnnnnnnnnnnnnnnnnnnnnnnnnnnnnnnnnnnnnnnnnnnnnnnnnnnnnnnnnnnnnnnnnnnnnnnnnnnnnnnnnnnnnnnnnnnnnnnnnnnnnnnnnnnnngttgttggttggcattcctcaggttatactttttgagacagaaacttttcctctttgcctagagctcacttgtttggctagattgagtgactagcagcaaacccaggaatcctctctccatcgttccagtgtcacttcaccctaattacttttttttttaaatataaaaatgtgggttctaggcattgaacccaggtcctcatgtttgcaaaccaagcacttattccctgaccctttatgaattgattctctctggaatctgttaccatagaaaattgactaatctcaagcaacaccactctgtggctggtgtagtggctgggggccaggcactttccattctcctgttgtatccccacagtgtgacagatctgcccactgcaggtaggaggggcaggtggcagcattctgcctgcccaaaatctgaatccttctctggagggcaagacctggtcccaagcaactagataaggaaagccccttctacttccaagacactaggaaaaagccttctgggcctaatgtgctgctttttttttttttttttttttttttttgagacagggtttctctatagccctggctgtcctggaactcattttgtagaccaggctggcctcgaactcagaaatccacctgcctctgcctcccgagtgctgggattaaaggcgtgggccaccacgcctggctctaatgtgcttttctccagaggaaggtgggtctggcatcatttgacttcttgattcagttccattcagcaagcactagacagagccacctgggtgccagccttgactgagttccagggactcagatatgactcagatgaagcttctgctatcacagatctactcacagacaggtagacagacagaccactgctgtcaacctgtaccacctgtaggacagggcaccatgaggaccttctcaaccgcccacatccttatctagaagtgggtccagtgagagtaggctggcccccttacattctgggtccctttacaacacatgacatatttacactgagagtccagtctgtgacttgagttcctatgctggctgggcctggctgagcagaagaaatagagaggcacacacctgtccccaggggttccatgagcacagggttcactcaagggttctaaattaaactgcatggttaaattcagatggtaagtaggtttgagacctttgagaggcaccaaggtggcccaaggtcacatgggaagacagctctcagttgataaaggagttcaggacgaattcaggaagtaacatcacgggtatggtgggccacatccacagccaggttccaggaaactgtccctgtgtcccacatccagcagtggtcatctcctttgggcatattcaactttcccctttgactctctcattcccaccagccacttaaagatcttgccaattggaaaagtctggggaagtccagatttctgtgatctaccatgatgagctgtacagccctggatggcacctggccaatctccctccagacttttctttgtgaattttgacaactgaagtataatggatgtctgcttatgccctgcttggacacagagccagccacctgggctcagctcagctctattattcctggaggccccctttctaaagaacccggcaagttctaagataatgacatgtcccttaggtgagctgctgcctgagactgggtgtaaatgtggcttttgctacttcatcctaactcagcctgaacctttctgatactgtgacaaaagcctgaagcagacagcttatgaagcaaaaaggtttattatggctggggtctttgaaattccagcccagaaggtggtgggccctatctcctttataactgtgcagcagatggttgcaaagcagagctgccagtgtcacagctggaaaatgaaagaaaaaagaccaagagtcacacagtcccctcacacacactcccatgatggaagatcccacactgcagagccctgcacttgcaataacagtctttagtccaggtcctcacatgttctacagcatgttccattgcatcacattgtgccgcaactgaagagctccagggactctcaaggcccaaagtataagagctagcctcaactatgtctccatctgctattctatgtacaatagaagctgactgtggaattcttaaaccccattcataaggttatagctacaaatgagcagatcgccttccaaaacatcaagtgatcacctcgtcacagcttcctggcccaagtgctctgtgtgtgtctgtgtgtgtacaagtgtctatacatgtgtctgcaggtacaattatgtatatttatgtgtgtacataggtgtgaagggaagagaggccagctgtagctgccattcctcagtcactatcatttgttgagataaggaacttatcttgccggcctgggactcaagtaagctaggctgtcaggtcacaaggtccagggtcctcctgttgccactttccatccctgggattacacgtgtataccaccgtgcgtgcctggtgttttcagctcaggttctggcatagagctcgggccctcgtgcttgtgaggtaagcacttgtgcagctgagaatcttcccagacataagatactgttcaagccctccagtgctcagcccaaccccctcctctgtgaagcagagcctcaacacctctctaccctccgtggcccctagccaccccagctgcaggtctgagacagagagagctcaccacccccagccctgctttctggtctccaccagacaaatgtatctccattagataccgggaggctgcctcagcaacataggttggtgccagattctgttttgttttgagacagggtctcactatgtagcccttgcaggccgggaaatcactatgtagaccaggctgacctctaagtcatagcccatcagcctctgctgcctgggagccaagatcaaaggcatgtgccatcactctcagcttttgctacttcatcctaacgcagcctgaacctttccgatactgtgacaaaagcctgaagcagtacactcctctatacaggagaggagcaactaaggccccgaccagagggtgacttaacccagatcacacagttcctgagaagtgcaaatgattcctgctaaccagtgtttccttcatgccgaagccttcccatcattgctccgttggcagtgggcccagctcagccacctgcactccctagtaccacatgtgagtgagtctgcgtgtgaggctaccccgggctcctgccccagagcctgtcctctcagagtgagagcaggacagtggaagaggggggaggggagctcatggagcctggaggctacacccagccaacagtcccaacactccggcagcaccacccaccacaccatagatagccagcagcttcctgggaactgcgtatagtctgggcagcaccttatctctccttgaagctgcttacctagcacacctgatctttcctcagtcaacccgcagccacacgcctgcagagccactgcagtggtgccttggccttagtgacatttgtcaccaagagcaggtgactacatgctgaccctcttcctgaggggcagaggaaaggcctggcctctctgcatccgctttgcaccaggttctatgtgagaagccaggaagactgtaaaaatgcagcaactcccagcaagccagttctgagcgccggagaaagtaaagcctaggaaggggcaagcaggccaaggagggcgggagccaaagacatccttctctaagtagccaatgcaccactgtcgtctccctcaccccatcctcttctccaatgccatcttcacctccatctttcctctggtcagctcctccactgccatcttcagcaccgctgtcagcatttctatgccacaacctcatcctcctgaatgctagcctctactgagcgctccctcggcctcagccttgtgctctttgggttgttatggtccgtctctgagtggcacacttgccctcttacccactctgtgctcacacacaggttcctgggcttgcctgaggtcttgggtctgggtctgactcccagacaaatgaggctgcacagccctaagccctgaacctcagagacatccctgtggcctggccaagttggtcccttgcactgtcaccatgggcagggtgttactgcagctgcaataacagtctttagtccaggtcctcacatgttctacagctctgaggacaggcagtctggaaggctgggcatggtgaagtgattctcagaggaaggaactgccccaagccacactccaccctcccaaagtcacctggtttcccaagaagagaaatgacagcaggaccagagataccttcagccaccagggacaagagccacaggcaccttttgtgatcacctttcatccctgctcacctgagagagaaagtgtccccagcggggtgctagacacctttaatgatagggtccaaacatccatctatctctaccctctgagtcttcctggggagcctgaagctgaaattcagactatttatttgtgggttgttgagccaaggaaactgtgtggatcattctggtctcaaactaatagcagtcttcctgcctcagcctcctgggtgctgggatgacaaagctgagtgaggtctcacactggctttctgtttagtttctgatgttttcactgagttgccaccaaacaccacaagaagggggtcccgttgcagcagggtttcaggaccttacctgcagtcagattaggcttttcaaagctttgagtttcaaaaaaactaattatgcagggcagggtggcaggtgtctgtcaggagttcccaggacaaacccaggctacatatagtgagaccctgtctcaaaaacaaatcggagcaatgcccagcagttaaagtatggaccactcttccagagaactggagtccaagttccagaccccatgtcaggcggctcacataagctccaggggatccagggtctctaaccaccgtggacatctgtactcatgtgtgcatgcccacacatatacacatgtacacagattgtaaataaaataaccattaaaaattaataagtaatagcggttaagtagtagcactcagccttactggccagcaggagcggcactgaaaagcctaagcatgtccagtcttgcctctcggcctggcatcatagtctctcagctgccagcccactcttcagctatctcagacttcctggacccttcccctggacctaagctactgataatgtgatgtacatgcctgaaacagccatgctaggaccaggcagaggtagaaaggttgaggggggcagacatgagcagaaccctcatcggctgagagccctggaatgaacggccatagggatactgcacttatatctgctctcgctctcacactgtgtcctgtagaccaggctccactgtcagacagcctcggtgtgtagaagggaatgcccagggccggagagggagagtagcctgcctaaggcccacagctgctcaggacagagtaacccctaggccccacctccctgacctcagaactcacgctctctctcccacaacctagattctaagtgccctcatctgaacttctccagctccccaaaggctcccagatggaatcatagtctcgggcagtgaccaaggggtgagttcctttactctgcctgggatatggactatgatgtgctgtgcccacttcagcaaaataatttctgtagcctgttcctagaaggaagggcaacagcgaatgctgacctcctggcac

SEQ ID NO: 262 - DNA, 2649 bp, Mus musculus
ccagagagcacttcatctaccagatatgactcctcctaggcgagtcagggagttagtactatcagaggatgggggaattccaggatatggccagagttgtcacatcaagaaatcaatgtctttgtgtcctgaccttctcggttctcccagtactgtcatcacttatgtgagattgagatggtgatcatgaagcttggcaagctctcagaggtggccgctgctgggacctcagtgcaggagcagaacaccacagacgaggagaagagcgccgccacgaactcagagaatgcacagtggagcagacccttcctggatatggtgtaccatgccctggacagccctgacgatgactatcacgccctcttcgtgctctgcctcctgtatgccatgtctcataacaaaggcatggatcctgaaaaactaaaacgaattcagctcccagtgccaagtgaagctgagaaaaccacctacaaccatctgctggccgagaggctcatcaggatcatgaacaatgctgctcagccagatggcaggatccggttggctacactggagctgagctgcctgctcctgaagcagcaagtactgaccagctctggctgtgtcatcaaggatgtgcacctggcctgtttggagggtgcaagagaagagagtgtccaccttgtacgtcatttctataagggagaagagattttcttggacatgtttgaagatgagtacaggagcatgacaataaagcccatgaatgtggagtatctcatgatggatgcttccatcctcctgcccccaacgggcactccactgactggcattgactttgtgaagcggctgccatgtggtgatgtggagaagacgaggcgggccatccgggtattcttcatgctgcgttccctgtcactgcagctgcgaggggaacctgagacccagttgccactgactcgggaggaggacctgatcaaaacagatgatgtcttggatctgaataacagtgacttgattgcatgcacagtcatcaccaaggatggtggtatggtccagcggttcctggctgtggacatttaccagatgagcctggtggagcctgacgtatccagacttggctggggagtggtcaagtttgctggccttctacaggacatgcaggtgacaggagtggaggatgacagccgtgccctgaacatcaccattcacaagcctgcctccagcccgcactctaagcccttccctatcctgcaggccaccttcgtgttctcggatcatatccgctgcattattgccaagcagcgcctggccaagggccgcatccaggccaggcgcatgaagatgcagaggatagccgcccttctggacctcccaatccagccgacaacagaagtcctgggatttggactctgctcctcctcctcctcctcccagcacctgcctttccgtttctatgagcagtgccgcagaggcagcagtgacccgacagtgcaacgctctgtgtttgcatccgtagacaaggtgccaggctttgctgtggcccagtgcataaaccagcatagctctccatccctgtcatcaccgtcgccaccatttgccagtgggagccctggtggcagtggaagcaccagccactgtgactcaggaggctcttcctctgcaccctcagcaacccagagcccggcagtcaggagtggcaggaaaggacgccggcgtgtgttcagcctgtcggaggccgacagtcacggcggccactgggtttagtgcttcgaccaacagctgccacggcaactcacgcacagtcaaatcaggcagatgcccccacgactccagaacagcctcagcctcacctagaccagtcagtgattgggaatgaaatggatgtcaactccaagcccagcaagaactcatcggccaggagctctgagggggagacaatgcacctgtcccctagcctccttcccgcccagcagcccaccatctccttgctctacgaggacactgctgacacactgagtgtcgagtcactgaccattgtccccccggtcgatccccacagcctccgagccctctctggcatctcccagctccccacactgcctgcagcagatacggagaccccagctgagggtgctgtaaacccagagcctgcggaacccacagagcactgagtgcgccagagctctccctttgtgtgtgcggcccgctggtagggaccccccatgcattttgtgacagcaagacacactgggagcacccacaattctccgtggccctgaaaactgcccctcatacctctccctacaagacaaccaccaagcactcatttgctctgacctctcgctgagcaggctgggatcctagaaacggcctcctgtgtagagacgatggcattggccacctcagaggggtctggggccctgcccctgatcctgacagccgcagggggcaggacccactggcaccgtcctttgggcagctcctttgtcttccctcccagtgtgcacagaagtggacaaggttactctgggtagaaacctgtggagaagcaaacctagataagcatctcctcgagctagttatttctggttttggcaacaaatgaagagatttattttaaaagaatctattttggaggaggggcaaaaagaaaaagccctcaaccat

SEQ ID NO: 263 - protein, 537 aa, Mus musculus
PSRFSQYCHHLCEIEMVIMKLGKLSEVAAAGTSVQEQNTTDEEKSAATNSENAQWSRPFLDMVYHALDSPDDDYHALFVLCLLYAMSHNKGMDPEKLKRIQLPVPSEAEKTTYNHLLAERLIRIMNNAAQPDGRIRLATLELSCLLLKQQVLTSSGCVIKDVHLACLEGAREESVHLVRHFYKGEEIFLDMFEDEYRSMTIKPMNVEYLMMDASILLPPTGTPLTGIDFVKRLPCGDVEKTRRAIRVFFMLRSLSLQLRGEPETQLPLTREEDLIKTDDVLDLNNSDLIACTVITKDGGMVQRFLAVDIYQMSLVEPDVSRLGWGVVKFAGLLQDMQVTGVEDDSRALNITIHKPASSPHSKPFPILQATFVFSDHIRCIIAKQRLAKGRIQARRMKMQRIAALLDLPIQPTTEVLGFGLCSSSSSSQHLPFRFYEQCRRGSSDPTVQRSVFASVDKVPGFAVAQCINQHSSPSLSSPSPPFASGSPGGSGSTSHCDSGGSSSAPSATQSPAVRSGRKGRRRVFSLSEADSHGGHWV

SEQ ID NO: 264 - DNA, 3777 bp, Mus musculus
catttcccagatttcctcgcggcggcggccgtaaagcgcggcggtcgaacggccggttccggctgaatgtcagtgcggggctttgggctggggagcaaggtgcttggcagtctctccaccgcccccgccgccgctggctgggcttgagatgtcgccgcggacaccgggccgctgggcggctcggacatgaaaccgtgaggcaggcgacagggctggtctgcggacatgtttggacgctcacggagctgggtgggcgggggccacagcaagtcctcccgcaacatccactccttggaccacctgaagtacctgtaccatgttttaacaaaaaacaccactgtcacagaacaaaatcggaacctgctcgtggagaccatccgttccatcactgagatcctgatttggggcgatcaaaatgacagctctgtgtttgacttcttcctggagaagaatatgtttgttttcttcttgaacattctgcggcagaaatcaggccgttatgtgtgtgtgcagctgctacagaccttgaacattctctttgagaacatcagccacgagacatcgctctattatttgctgtctaataactatgtaaactcgatcattgtccataaatttgacttttccgacgaggagatcatggcgtattacatatcgttcctgaaaacgctttcattaaagctcaacaaccacactgtccatttcttttacaatgagcacaccaatgactttgccctgtacacagaagccatcaagttcttcaatcatcccgaaagcatggttcgaattgccgtgagaaccatcactttgaatgtctacaaagtggataaccaggccatgctgcactacatcagagacaaaaccgctgtcccgtacttctccaatttggtctggttcattgggagccatgtgatcgaacttgacaactgtgtgcagacagatgaggagcaccggaatcgggggaaactgagtgacctggtggctgagcacttggaccacctgcactatctcaacgacatcctgatcatcaactgcgagttcctcaatgacgtactcaccgaccacctgctcaacaggcttttcctgccgctctacgtgtactccctggagaaccccgacaagggaggagaacggccaaaaatcagcctgcctgtgtccctctatcttctctcccaggtcttcctcattatacatcacgccccgctggtgaactctctggctgaagtcattctgaatggtgatctatctgagacatacacaaagcctgcacaggatgttcccagaagttctgccaagcccagcatccggtgcttcattaagcccactgagacactcgagcggtcccttgagatgaacaagcacaagggcaagaagcggatgcaaaagagacccaactacaaaaacgttggggaggaggaggacgaggagagagggtctgctgaagatgcccaggaagacgctgagaagactaaaggtacagagggtggttcaaaaagcatgaagacaagtggggagcgtgaagagattgagatggtgatcatgaagcttggcaagctctcagaggtggccgctgctgggacctcagtgcaggagcagaacaccacagacgaggagaagagcgccgccacgaactcagagaatgcacagtggagcagacccttcctggatatggtgtaccatgccctggacagccctgacgatgactatcacgccctcttcgtgctctgcctcctgtatgccatgtctcataacaaaggcatggatcctgaaaaactaaaacgaattcagctcccagtgccaagtgaagctgagaaaaccacctacaaccatctgctggccgagaggctcatcaggatcatgaacaatgctgctcagccagatggcaggatccggttggctacactggagctgagctgcctgctcctgaagcagcaagtactgaccagctctggctgtgtcatcaaggatgtgcacctggcctgtttggagataaagcccatgaatgtggagtatctcatgatggatgcttccatcctcctgcccccaacgggcactccactgactggcattgactttgtgaagcggctgccatgtggtgatgtggagaagacgaggcgggccatccgggtattcttcatgctgcgttccctgtcactgcagctgcgaggggaacctgagacccagttgccactgactcgggaggaggacctgatcaaaacagatgatgtcttggatctgaataacagtgacttgattgcatgcacagtcatcaccaaggatggtggtatggtccagcggttcctggctgtggacatttaccagatgagcctggtggagcctgacgtatccagacttggctggggagtggtcaagtttgctggccttctacaggacatgcaggtgacaggagtggaggatgacagccgtgccctgaacatcaccattcacaagcctgcctccagcccgcactctaagcccttccctatcctgcaggccaccttcgtgttctcggatcatatccgctgcattattgccaagcagcgcctggccaagggccgcatccaggccaggcgcatgaagatgcagaggatagccgcccttctggacctcccaatccagccgacaacagaagtcctgggatttggactctgctcctcctcctcctcctcccagcacctgcctttccgtttctatgagcagtgccgcagaggcagcagtgacccgacagtgcaacgctctgtgtttgcatccgtagacaaggtgccaggctttgctgtggcccagtgcataaaccagcatagctctccatccctgtcatcaccgtcgccaccatttgccagtgggagccctggtggcagtggaagcaccagccactgtgactcaggaggctcttcctctgcaccctcagcaacccagagcccggcagatgcccccacgactccagaacagcctcagcctcacctagaccagtcagtgattgggaatgaaatggatgtcaactccaagcccagcaagaactcatcggccaggagctctgagggggagacaatgcacctgtcccctagcctccttcccgcccagcagcccaccatctccttgctctacgaggacactgctgacacactgagtgtcgagtcactgaccattgtccccccggtcgatccccacagcctccgagccctctctggcatctcccagctccccacactgcctgcagcagatacggagaccccagctgagggtgctgtaaacccagagcctgcggaacccacagagcactgagtgcgccagagctctccctttgtgtgtgcggcccgctggtagggaccccccatgcattttgtgacagcaagacacactgggagcacccacaattctccgtggccctgaaaactgcccctcatacctctccctacaagacaaccaccaagcactcatttgctctgacctctcgctgagcaggctgggatcctagaaacggcctcctgtgtagagacgatggcattggccacctcagaggggtctggggccctgcccctgatcctgacagccgcagggggcaggacccactggcaccgtcctttgggcagctcctttgtcttccctcccagtgtgcacagaagtggacaaggttactctgggtagaaacctgtggagaagcaaacctagataagcatctcctcgagctagttatttctggttttggcaacaaatgaagagatttattttaaaagaatctattttggaggaggggcaaaaagaaaaagccctcaacca

SEQ ID NO: 265 - protein, 1027 aa, Mus musculus
GRRQGWSADMFGRSRSWVGGGHSKSSRNIHSLDHLKYLYHVLTKNTTVTEQNRNLLVETIRSITEILIWGDQNDSSVFDFFLEKNMFVFFLNILRQKSGRYVCVQLLQTLNILFENISHETSLYYLLSNNYVNSIIVHKFDFSDEEIMAYYISFLKTLSLKLNNHTVHFFYNEHTNDFALYTEAIKFFNHPESMVRIAVRTITLNVYKVDNQAMLHYIRDKTAVPYFSNLVWFIGSHVIELDNCVQTDEEHRNRGKLSDLVAEHLDHLHYLNDILIINCEFLNDVLTDHLLNRLFLPLYVYSLENPDKGGERPKISLPVSLYLLSQVFLIIHHAPLVNSLAEVILNGDLSETYTKPAQDVPRSSAKPSIRCFIKPTETLERSLEMNKHKGKKRMQKRPNYKNVGEEEDEERGSAEDAQEDAEKTKGTEGGSKSMKTSGEREEIEMVIMKLGKLSEVAAAGTSVQEQNTTDEEKSAATNSENAQWSRPFLDMVYHALDSPDDDYHALFVLCLLYAMSHNKGMDPEKLKRIQLPVPSEAEKTTYNHLLAERLIRIMNNAAQPDGRIRLATLELSCLLLKQQVLTSSGCVIKDVHLACLEIKPMNVEYLMMDASILLPPTGTPLTGIDFVKRLPCGDVEKTRRAIRVFFMLRSLSLQLRGEPETQLPLTREEDLIKTDDVLDLNNSDLIACTVITKDGGMVQRFLAVDIYQMSLVEPDVSRLGWGVVKFAGLLQDMQVTGVEDDSRALNITIHKPASSPHSKPFPILQATFVFSDHIRCIIAKQRLAKGRIQARRMKMQRIAALLDLPIQPTTEVLGFGLCSSSSSSQHLPFRFYEQCRRGSSDPTVQRSVFASVDKVPGFAVAQCINQHSSPSLSSPSPPFASGSPGGSGSTSHCDSGGSSSAPSATQSPADAPTTPEQPQPHLDQSVIGNEMDVNSKPSKNSSARSSEGETMHLSPSLLPAQQPTISLLYEDTADTLSVESLTIVPPVDPHSLRALSGISQLPTLPAADTETPAEGAVNPEPAEPTEH

SEQ ID NO: 266 - DNA, 257645 bp, Homo sapiens
  misc_feature (1)...(257645): n = A,T,C or G
gaggaagggcacccaaggaaagggggaaggcttcctgggctagagccccttcagggtctgacacgccattgacactgaccacgtcattcattaagcaagcaccaactatacatcattcactatcccaatctaatttgcacaagcccttaggcaggtgctactattatccctgttttacagagaaggaaaccgaggcttaggagatgaagtctgaggtgttggtggagctgggatttaaaccaaaatatgtccaactgcaaagcatgtaagtaacaattttagagggtatacggaggtgaccctaagtaacaaggaatcacatatagtgagcaagcaatttgcttttcagtttttggtcaatccttatgattatttagaggagaaagttcagtttggtgctggtatatcttatgtttatcacccgacagttgttaatctctttttaacaaagaatacaggccaaggccctgtgactttagctggctttggtatttggccaaaagttaatgactttggcagttagtgtttttatccatgccaagcgatgatgattttctctttagtgacagacattttttaaaaaataaattcacataaaaaagtagttttacagatgaagcactaaaactagtgcatttcatcttaaactgcaaattataaagggaataatagtaacttgacagtggagagacctggcagacaccaccttcaccaactgatcaaagttaacatcgccagaaaggggacagatggcatgtgcctctcgataagatgcactgaagacacacactcacttctgcaatattcctgccaagaatgcctcatctgaatctaatctcgagtataaccatcagacaaacccaaattgagagacagtttacaaaacaccagccttgtactctgcttaatatgtcaatgtcacaagagagaaagacagactgaagagctgatccagactgaagaaggctcgagattaatgcaaaagctgatctgggattgcatcttggacctcaactctcccctttttattgttaagggacactactgggacaatttttttttttttttcgttttgagacagggtctcgctcagtcacccaggctggagtgcagtggtggaataataactcactgcagccttgaactcccggactcaagcaatcctcctgcctgagccttccgagtaactgggactatgggcgtgtaccacaacacctcgctattttttttttcctactttttgtagagacggggtctcactatgttgcccaggctggtttcaaactcaagtgatccttccacctcagcctctataaaatttgaataaagttgtagatgagattggtcataggattgtatagtgtatcaatattagatttgctgattttgacaaccctactgtggttatgcaaatttgtccttgttctaaggaaataaatactgaattatttaggagtaaaggtgcataatgaacccattttcaaatgcttatgaaaattacacatatacacatgtgtgcatatacacaggcatgcatatacaaacagagggaagagcatgcacgtgtacatgagcaaagtgctaactggtgcaactggtgagtttgggcgggcattgtttgtgctcttgcaacttttctgtaagtgtgaaattacttcataacagaggtttttgtttgtttgtttgtttttaattcaggaaaaagttggaagagtgcgtatgaaataggcctggcagaaactatgagctggtgttccaaggtcggggatggggagccctcactggaggcacccctcaaaccctcagtgctgtggccagggaaccgggctggcagtcttagttggctttgttccctcggcctccacttccccattctgtgcctccatttatttgtgagacagggataaagaggtctgccacttttattgtgatcttaggtttcccaaaagcagagtatgctttcagaagttctgggaggaaagctagcagataaaccagaaatatgaatatccaaattgagagaagccctcactttcttagttcagcaaaacagacacatgagctgtaagtggggcagaccctgcctgtttcttggctgaaatctccagtttgtataattcagggctaagagagcaggactcttgacatctcactgtcttgagacacatactggggttttctcctgtctgaagacgcagctggcaccaatgtaccctatggccaaggaccttctgggtgagcctcatgtcaggagcagagctggagaggtggccaggcctgggggtatacttgcctccctgtgtcaccattgtctgtctcttgcttagatgacagccacagcttcctggcctggtttcctgcatccgccctgacccctggctgtgggatctcccataactcaaatctgactgtgtgccctgtggaaggtttgggtttctgacctgggcagctctatgtccggcacagnnnnnnnnnnnnnnnnnnnnnnnnnnnnnnnnnnnnnnnnnnnnnnnnnnnnnnnnnnnnnnnnnnnnnnnnnnnnnnnnnnnnnnnnnnnnnnnnnnnnnnnnnnnnnnnnnnnnnnnnnnnnnnnnnnnnnnnnnnnnnnnnnnnnnnnnnnnnnnnnnnnnnnnnnnnnnnnnnnnnnnnnnnnnnnnnnnnnnnnnnnnnnnnnnnnnnnnnnnnnnnnnnnnnnnnnnnnnnnnnnnnnnnnnnnnnnnnnnnnnnnnnnnnnnnnnnnnnnnnnnnnnnnnnnnnnnnnnnnnnnnnnnnnnnnnnnnnnnnnnnnnnnnnnnnnnnnnnnnnnnnnnnnnnnnnnnnnnnnnnnnnnnnnnnnnnnnnnnnnnnnnnnnnnnnnnnnnnnnnnnnnnnnnnnnnnnnnnnnnnnnnnnnnnnnnnnnnnnnnnnnnnnnnnnnnnnnnnnnnnnnnnnnnnnnnnnnnnnnnnnnnnnnnnnnnnnnnnnnnnnnnnnnnnnnnnnnnnnnnnnnnnnnnnnnnnnnnnnnnnnnnnnnnnnnnnnnnnnnnnnnnnnnnnnnnnnnnnnnnnnnnnnnnnnnnnnnnnnnnnnnnnnnnnnnnnnnnnnnnnnnnnnnnnnnnnnnnnnnnnnnnnnnnnnnnnnnnnnnnnnnnnnnnnnnnnnnnnnnnnnnnnnnnnnnnnnnnnnnnnnnnnnnnnnnnnnnnnnnnnnnnnnnnnnnnnnnnnnnnnnnnnnnnnnnnnnnnnnnnnnnnnnnnnnnnnnnnnnnnnnnnnnnnnnnnnnnnnnnnnnnnnnnnnnnnnnnnnnnnnnnnnnnnnnnnnnnnnnnnnnnnnnnnnnnnnnnnnnnnnnnnnnnnnnnnnnnnnnnnnnnnnnnnnnnnnnnnnnnnnnnnnnnnnnnnnnnnnnnnnnnnnnnnnnnnnnnnnnnnnnnnnnnnnnnnnnnnnnnnnnnnnnnnnnnnnnnnnnnnnnnnnnnnnnnnnnnnnnnnnnnnnnnnnnnnnnnnnnnnnnnnnnnnnnnnnnnnnnnnnnnnnnnnnnnnnnnnnnnnnnnnnnnnnnnnnnnnnnnnnnnnnnnnnnnnnnnnnnnnnnnnnnnnnnnnnnnnnnnnnnnnnnnnnnnnnnnnnnnnnnnnnnnnnnnnnnnnnnnnnnnnnnnnnnnnnnnnnnnnnnnnnnnnnnnnnnnnnnnnnnnnnnnnnnnnnnnnnnnnnnnnnnnnnnnnnnnnnnnnnnnnnnnnnnnnnnnnnnnnnnnnnnnnnnnnnnnnnnnnnnnnnnnnnnnnnnnnnnnnnnnnnnnnnnnnnnnnnnnnnnnnnnnnnnnnnnnnnnnnnnnnnnnnnnnnnnnnnnnnnnnnnnnnnnnnnnnnnnnnnnnnnnnnnnnnnnnnnnnnnnnnnnnnnnnnnnnnnnnnnnnnnnnnnnnnnnnnnnnnnnnnnnnnnnnnnnnnnnnnnnnnnnnnnnnnnnnnnnnnnnnnnnnnnnnnnnnnnnnnnnnnnnnnnnnnnnnnnnnnnnnnnnnnnnnnnnnnnnnnnnnnnnnnnnnnnnnnnnnnnnnnnnnnnnnnnnnnnnnnnnnnnnnnnnnnnnnnnnnnnnnnnnnnnnnnnnnnnnnnnnnnnnnnnnnnnnnnnnnnnnnnnnnnnnnnnnnnnnnnnnnnnnnnnnnnnnnnnnnnnnnnnnnnnnnnnnnnnnnnnnnnnnnnnnnnnnnnnnnnnnnnnnnnnnnnnnnnnnnnnnnnnnnnnnnnnnnnnnnnnnnnnnnnnnnnnnnnnnnnnnnnnnnnnnnnnnnnnnnnnnnnnnnnnnnnnnnnnnnnnnnnnnnnnnnnnnnnnnnnnnnnnnnnnnnnnnnnnnnnnnnnnnnnnnnnnnnnnnnnnnnnnnnnnnnnnnnnnnnnnnnnnnnnnnnnnnnnnnnnnnnnnnnnnnnnnnnnnnnnnnnnnnnnnnnnnnnnnnnnnnnnnnnnnnnnnnnnnnnnnnnnnnnnnnnnnnnnnnnnnnnnnnnnnnnnnnnnnnnnnnnnnnnnnnnnnnnnnnnnnnnnnnnnnnnnnnnnnnnnnnnnnnnnnnnnnnnnnnnnnnnnnnnnnnnnnnnnnnnnnnnnnnnnnnnnnnnnnnnnnnnnnnnnnnnnnnnnnnnnnnnnnnnnnnnnnnnnnnnnnnnnnnnnnnnnnnnnnnnnnnnnnnnnnnnnnnnnnnnnnnnnnnnnnnnnnnnnnnnnnnnnnnnnnnnnnnnnnnnnnnnnnnnnnnnnnnnnnnnnnnnnnnnnnnnnnnnnnnnnnnnnnnnnnnnnnnnnnnnnnnnnnnnnnnnnnnnnnnnnnnnnnnnnnnnnnnnnnnnnnnnnnnnnnnnnnnnnnnnnnnnnnnnnnnnnnnnnnnnnnnnnnnnnnnnnnnnnnnnnnnnnnnnnnnnnnnnnnnnnnnnnnnnnnnnnnnnnnnnnnnnnnnnnnnnnnnnnnnnnnnnnnnnnnnnnnnnnnnnnnnnnnnnnnnnnnnnnnnnnnnnnnnnnnnnnnnnnnnnnnnnnnnnnnnnnnnnnnnnnnnnnnnnnnnnnnnnnnnnnnnnnnnnnnnnnnnnnnnnnnnnnnnnnnnnnnnnnnnnnnnnnnnnnnnnnnnnnnnnnnnnnnnnnnnnnnnnnnnnnnnnnnnnnnnnnnnnnnnnnnnnnnnnnnnnnnnnnnnnnnnnnnnnnnnnnnnnnnnnnnnnnnnnnnnnnnnnnnnnnnnnnnnnnnnnnnnnnnnnnnnnnnnnnnnnnnnnnnnnnnnnnnnnnnnnnnnnnnnnnnnnnnnnnnnnnnnnnnnnnnnnnnnnnnnnnnnnnnnnnnnnnnnnnnnnnnnnnnnnnnnnnnnnnnnnnnnnnnnnnnnnnnnnnnnnnnnnnnnnnnnnnnnnnnnnnnnnnnnnnnnnnnnnnnnnnnnnnnnnnnnnnnnnnnnnnnnnnnnnnnnnnnnnnnnnnnnnnnnnnnnnnnnnnnnnnnnnnnnnnnnnnnnnnnnnnnnnnnnnnnnnnnnnnnnnnnnnnnnnnnnnnnnnnnnnnnnnnnnnnnnnnnnnnnnnnnnnnnnnnnnnnnnnnnnnnnnnnnnnnnnnnnnnnnnnnnnnnnnnnnnnnnnnnnnnnnnnnnnnnnnnnnnnnnnnnnnnnnnnnnnnnnnnnnnnnnnnnnnnnnnnnnnnnnnnnnnnnnnnnnnnnnnnnnnnnnnnnnnnnnnnnnnnnnnnnnnnnnnnnnnnnnnnnnnnnnnnnnnnnnnnnnnnnnnnnnnnnnnnnnnnnnnnnnnnnnnnnnnnnnnnnnnnnnnnnnnnnnnnnnnnnnnnnnnnnnnnnnnnnnnnnnnnnnnnnnnnnnnnnnnnnnnnnnnnnnnnnnnnnnnnnnnnnnnnnnnnnnnnnnnnnnnnnnnnnnnnnnnnnnnnnnnnnnnnnnnnnnnnnnnnnnnnnnnnnnnnnnnnnnnnnnnnnnnnnnnnnnnnnnnnnnnnnnnnnnnnnnnnnnnnnnnnnnnnnnnnnnnnnnnnnnnnnnnnnnnnnnnnnnnnnnnnnnnnnnnnnnnnnnnnnnnnnnnnnnnnnnnnnnnnnnnnnnnnnnnnnnnnnnnnnnnnnnnnnnnnnnnnnnnnnnnnnnnnnnnnnnnnnnnnnnnnnnnnnnnnnnnnnnnnnnnnnnnnnnnnnnnnnnnnnnnnnnnnnnnnnnnnnnnnnnnnnnnnnnnnnnnnnnnnnnnnnnnnnnnnnnnnnnnnnnnnnnnnnnnnnnnnnnnnnnnnnnnnnnnnnnnnnnnnnnnnnnnnnnnnnnnnnnnnnnnnnnnnnnnnnnnnnnnnnnnnnnnnnnnnnnnnnnnnnnnnnnnnnnnnnnnnnnnnnnnnnnnnnnnnnnnnnnnnnnnnnnnnnnnnnnnnnnnnnnnnnnnnnnnnnnnnnnnnnnnnnnnnnnnnnnnnnnnnnnnnnnnnnnnnnnnnnnnnnnnnnnnnnnnnnnnnnnnnnnnnnnnnnnnnnnnnnnnnnnnnnnnnnnnnnnnnnnnnnnnnnnnnnnnnnnnnnnnnnnnnnnnnnnnnnnnnnnnnnnnnnnnnnnnnnnnnnnnnnnnnnnnnnnnnnnnnnnnnnnnnnnnnnnnnnnnnnnnnnnnnnnnnnnnnnnnnnnnnnnnnnnnnnnnnnnnnnnnnnnnnnnnnnnnnnnnnnnnnnnnnnnnnnnnnnnnnnnnnnnnnnnnnnnnnnnnnnnnnnnnnnnnnnnnnnnnnnnnnnnnnnnnnnnnnnnnnnnnnnnnnnnnnnnnnnnnnnnnnnnnnnnnnnnnnnnnnnnnnnnnnnnnnnnnnnnnnnnnnnnnnnnnnnnnnnnnnnnnnnnnnnnnnnnnnnnnnnnnnnnnnnnnnnnnnnnnnnnnnnnnnnnnnnnnnnnnnnnnnnnnnnnnnnnnnnnnnnnnnnnnnnnnnnnnnnnnnnnnnnnnnnnnnnnnnnnnnnnnnnnnnnnnnnnnnnnnnnnnnnnnnnnnnnnnnnnnnnnnnnnnnnnnnnnnnnnnnnnnnnnnnnnnnnnnnnnnnnnnnnnnnnnnnnnnnnnnnnnnnnnnnnnnnnnnnnnnnnnnnnnnnnnnnnnnnnnnnnnnnnnnnnnnnnnnnnnnnnnnnnnnnnnnnnnnnnnnnnnnnnnnnnnnnnnnnnnnnnnnnnnnnnnnnnnnnnnnnnnnnnnnnnnnnnnnnnnnnnnnnnnnnnnnnnnnnnnnnnnnnnnnnnnnnnnnnnnnnnnnnnnnnnnnnnnnnnnnnnnnnnnnnnnnnnnnnnnnnnnnnnnnnnnnnnnnnnnnnnnnnnnnnnnnnnnnnnnnnnnnnnnnnnnnnnnnnnnnnnnnnnnnnnnnnnnnnnnnnnnnnnnnnnnnnnnnnnnnnnnnnnnnnnnnnnnnnnnnnnnnnnnnnnnnnnnnnnnnnnnnnnnnnnnnnnnnnnnnnnnnnnnnnnnnnnnnnnnnnnnnnnnnnnnnnnnnnnnnnnnnnnnnnnnnnnnnnnnnnnnnnnnnnnnnnnnnnnnnnnnnnnnnnnnnnnnnnnnnnnnnnnnnnnnnnnnnnnnnnnnnnnnnnnnnnnnnnnnnnnnnnnnnnnnnnnnnnnnnnnnnnnnnnnnnnnnnnnnnnnnnnnnnnnnnnnnnnnnnnnnnnnnnnnnnnnnnnnnnnnnnnnnnnnnnnnnnnnnnnnnnnnnnnnnnnnnnnnnnnnnnnnnnnnnnnnnnnnnnnnnnnnnnnnnnnnnnnnnnnnnnnnnnnnnnnnnnnnnnnnnnnnnnnnnnnnnnnnnnnnnnnnnnnnnnnnnnnnnnnnnnnnnnnnnnnnnnnnnnnnnnnnnnnnnnnnnnnnnnnnnnnnnnnnnnnnnnnnnnnnnnnnnnnnnnnnnnnnnnnnnnnnnnnnnnnnnnnnnnnnnnnnnnnnnnnnnnnnnnnnnnnnnnnnnnnnnnnnnnnnnnnnnnnnnnnnnnnnnnnnnnnnnnnnnnnnnnnnnnnnnnnnnnnnnnnnnnnnnnnnnnnnnnnnnnnnnnnnnnnnnnnnnnnnnnnnnnnnnnnnnnnnnnnnnnnnnnnnnnnnnnnnnnnnnnnnnnnnnnnnnnnnnnnnnnnnnnnnnnnnnnnnnnnnnnnnnnnnnnnnnnnnnnnnnnnnnnnnnnnnnnnnnnnnnnnnnnnngaattcgctctgcgtatcgaatagggggaggtaaaagagactgaacacagttcaaacctagacataatgctaaggccgcaaaagccgaaggaaacccgggctaccgctgcgccttgctgcatgcctctttgggactccgtttctcctttaaaaggaggcggggtcggggaggggcgacggacggttgccctggaaattttggacattcccaaagcgccaattttcatggtggagatccaccagtgtccccttcgcttctccaaactctggttgctggaaggtccgcccactacggaacctgcatcctagagttaaggaacacctgaataaagagattccgaggtagttcagatcttcaaccataaggatgctttttgtttctttttactttgtgaatcatgtttaaaagcaataatacacatggctaaacattcaaacaaccgtgaagtacacagaaaagtgagtctctcccacccactggttcccctgctcttgggtaaccgttgcatgtctttcaggaaaacatgatctcgcccaaagagccttccaaagcagttcaagaaacctttaaatctcaggccacactgagctgagtattttacatgcatcgcttaatcggaggtatacaaggcagtgtagtatgtatgtgcgtactttttacagatgaaaaatacgagcccagggatcctacatttctgagcctgggtgtgtttctttggaggccagatcctgttcttttttgctccatgactttgtcttgccccactctatatgaattacaggacaaaccattaactctccactcttatccatttctccaactgctgaaggtgaaacaaacctttactcattcatgcactctaccaatatttgttaaacacctgctatgtgccaaaccttgtgctaggcactggggagaacattggcctctggcccagttctttcttgagcagagttaatgggacacagtggacctttaataaggttgatatgtagaagtgactgaatgaatgaatggatggtaaacttgagaagtcttgcccacactgaacttaccacttctaatccagggtagaagttagatatattctggctcatgcagaaagttgggtgtttcctttttcattttaacgtggtactttgggaaatagcatggattctggctgaagaccagaggaatcctctggaagtacaaaatgttcagtttggtgcattgttgcatccagccttttccaacacacacacacacacacacacacacacacacacacacacacacacacttaattgaagtggaaaaagaaaaaggctgtcaggacaaataaggttgttatctagtgccgttttggtttataaagggaatgaaaaataagggtgcgtgcgtggttatgaaccctggttttgccacttgttaactgcatgatcttgggtaagtcaacctctcagtgactccgtttccctgatgataaaataggttcgataatagtacccaattcataggatggttgtgaaaattaaataccttaatatgtaaagcccttaggatagtggctttgcatagtatacaccatccaatactattcttattcttattataaatctagtaattgttactacagtggtgactttccttgacccatctacgccgattccctctccgggactgcgcccaaagcttccaattcccgcccacccggaggattctgcggtcgctcctcctctcgccccgccttttgtggatggccgtaggcccgcggttgcacgatgcatgccgggccttgtagtccgttcgcggagtcctgccgccgaaggccacgcgggtgaactgcatttcccagcgccccacgcggcggcggccgtaaagcgcggcggtcgaacggccggttccggctgaatgtcagtgctgggctgtgggccggggaggaaggcggctcgcggttcctccaccgcctccgccgccgcatcctccgcttgtgctaccgccgcgggcgctgggccgctctgctggtccggcatgagaccgtgagacgagagacgggtcggggccgccgacatgtttggccgctcgcggagctgggtgggcgggggccatggcaagacttcccgcaacatccactccttggaccacctcaagtgagtgtggggggcgtagcgggaggcctcggggctggacagggggacggggcgccgagctccgggtcggggctctaggaggcgtgagagcggcggcgaagggcgcccggggaagcccgtgtggtggttaagagcgagggctcgggagtcagggcgcctgggttcgaaccctgaccccgtcgctcttggctgtgtgaccttggacaagtcgcttaatttctcagagtctccgtatccccacctgtaaagcgagaggatgcgatttcagtttatggacacagactttgttcttgacggtgtccaccaagtttcctggcggggtacttcttaaactgaacagcttagagggtcaaaggcctgggtcctggagtcgggcagatctgggtccgaatctatctgtgtgaatgtaggcctcaggttccccacttgtaaaaagagtagagtgacagcacctgcttcctgctattgtgttgagagttggttggataagagaatgaacgttaagctcagaacacgtacaattgctcattaaacggcattaattattataaaagaacagattattttccgaggggagtctaagctgggggcatgcacgctgagacccaggattttggggcgattggggaggatgatgaaaaatagagacctctgaggagggaatgactctacagctctgggggaggacaggtggcagatagggtcttgggaccaggagtgcagaaattaagaggctggctttgcagccacacctgcgttcaaatcctgaaaccaccatttactggctgtgtgaccttgggcaaattacttcacctctctgagcctccagattcccatttgcaaatggggatcgtgaacattgtaatggaaatggaaggtgactgacccagtaggtacatagtaggtggccagtagtggtagctgtgtttattatcagctcagcgaggccttcccagaccaccctacctaacgtgctccccccatcccagttcctatccatcacatctttctcttgctttcattgagtgcttctccactgtctgcgattattctttattttttatttatacttattttctgtcttctgttaaactggcacttcacgagggcacagactgcttggtttgttcacagttgtattcccagcatctaggactgctctctgcttacttaaagagtggaaaaatgaatgattgaattggggagagatgaagagcatgcaggccaggacccaggatttgggggcaggtgtggaggatgatgaaaaatagagatctgtatgaagggaaaggctttagggagggaaatggcggggatgctgaagaggggagtagacaaatcttcagtgtcaagaaataggcaggtttccagaaggagatcctgagactactaatgggaaaggaggaagatagggttagggatatggtgggaagtagtggaagggagacggggctgtggaaaggattggtgggagggaattagatagggacttctcatgtgtccccgggagtggggtaggggtagtggcagggccacagttctcagctgtgacctttctagcatggagcagcatttagtaaacgtttgtgagtcttgaagagtggggagcaggagggttcactatgtggtgaggggcacttttagagcaggaggtggtgagagaagacaaggggaggaaagaggcccaggacaagtctggggtgggtagggaggtggggatcttagatgggagggcagctggccgggaaagggagtggttgaaggatttcaggaatttatcgagtgggcggaggtggctgaggaggggaggggagttatccagaggaggttgggcctcctgccggcatccaggtacctccaggttctcacctaactctgcttaactctagcccttttaaattaccttaatttattaatttatcgaatgcattattctgtaccaggtatttgctaaggactgcctgtgtgttatttcccttagtcctcacaagtctgagttacaggaaccattattgtttccattttacggaagtggaaactaaggttcagggggcttcagtgacttgcccccaggtgtcagcagctgaagggtaccagaggcaggatttgactcccgagcttgtgctcattatactgtctttctgaataaaacttcccaataagtctgtttgagaacacttttgacttggctgagtctcatcgccaatggggcatctttgccagccagcagggaatggtaaacggtctctggttcctttgcagtatcctgggaactgcctgggttcattgtttagatcacatgtctatcggatgcttctttggaaacccaagttgcctgccctgaatcaggcagatcagcttaatccatattacagccccaagaacctgagatttgtgtattggtgggggggttagaagatcccccagtgacttggaaaagagttttgtaaacagccagtgcccaccctggggcttgtgccactctgcatttggctctgttggtaaacatcttgggtcttgggtacagaacagctcgttccctgagggagtttgcaggctggtgggggagacagctgtagagccagtgactgtacagtgtgataagtgctgagatcgccatggacccagggttctgtgggaacccttattgggagctttctggaggagacaacaccagcgcgggttctccaagaatgaacagaagccaccattggggggcagcaggggcgggaggcggagcactgtgaccaggaccctgcgggttttgtggcatgtccaggtgggggctgatagctgtgggaaacaaggctggaagtaggaaggggcttgggatttatctgacacttcgggtgaccaaccgtcctggtttgcctgggctgaggggtttcccaggatatgggactttcagtgctaaaactgggaaagtcctggacaaactagtataaactggtcaccctaccagtgacaagtgacagttcttaatacactcttaccttgacctagagcagtatggatggagagggaaagtttaagatagttaaaagaattatttatttattattattattttttaaatacacaaggcatctggaaaccctcttctttttttttttgagataagagtctcgctctgttgcccaggctggagtgcagtggcacgatcttggctcactgcaagctccgcctcccaggttcacgccattctcctgcctcagcctccagagtagctgggactacaggcgcccgccaccacgcccagctaattttttgtatttttagtagagacggggtttcaccgtgttagccaggatggtcttgatctcctgacctcatgatctgcccaccttgacctcccaaagtgctgggattacaggcatgagccactgcacccggcctagactttacttttttagaacagtttgagatttacagaaaggttgagaagatagcacagagagctggaaactgtttttagcttcattattctttgtaacactcccagcttgcaaactggaaaggaattttcctgttagggttttgcttttgctaaatggtagaaaacttcatacctgtggtctctgtctgctgaactgagttagtgatttagctcaggcagattgaagtagtcaagaggttatttgctacacaccatgggtggtttattgtccagattagtggcaaggctgtgacattgactgacaaatgtccaccaccaagcggaagcctgagtgatggaatcgtttgattgctactgaaacatcatctttaccagggactgcaagtctgcggctggtagaaattggtcgtttttgtattgtggccttcattctggtccactttgtgtgggggtcaagatttttggttccagtgacagaaacccagctagaattgccttaagcctcaaatggattgaatagctcatgtcactgaatggtctgtccccgctaaaccatggctgaatccaggtgtttggagccgtcagaaatcggcctttttccacctttcagctctacctttttcctgttggtgtcattttcaggcaggctgcaggcttacatcatatcagcttagcattcctgaggaaaaagagagcttcttttctcaatattgccagcagaagtccagaattgagattgagtatccctggaccagcaaggtctcatgccacccctgaactgtcactctggccaaaggtatagggggatctgattggccattcctcactcatattcccttccctggagcaagagtgggattagctccactcaagctagtggaaaagaatgagagaaaagggtggttccccatgggagaatcaggggttattgcccaaagaaggcggagaatggatccatggcaggtagacagacgcacacctactcttggtgctttcaagttttggctaaggtggcactgacagtgttagagcttggggtacaatattgccatgttgattttcttaaaatatcgtcttcaccatgccacatattatgggtcctaggctcccactatgtcacgtctaagttcttccaggccttcccaccatctagtttgggagcacagggagttaggaacatccttgttaggcagacgctgtttaaatggagaccaacggggtgagtcgttgttaccaggcagcggggtgtcaggtggaaggaaggatgtttcaggcagaggaaaaggcatttgagaaagcctagtggggcaaggggagcagtgcacattggcagaactcacgtggttcagcaggggagtgttcactgggtgaagaggaagtgaggacccaagctcagagccatgcttggcagagtctccagaggccaggtcccctggggccctgtaaatcactttaaggaattcagactatgagtgagaacagtagggagccactgaaggttttttaactacagaaaggctgtggtctggctgaagctggcagaatggattggatgaggggcagactggaggtgggcctccacatgtgttggtggggcggggagcaggggctctgctgccgtcccctggtgagttacggtagcagctgctgtcatccaggtgtatctcctgttggtggtccactcacacacatacctcgcctgcccacttgaggtcccctgctcttttcctcctgcccatccaaatccctagctctatcccgaaaatgccagttcttccctaaaaattgccctggtgacttcagccaacaagagttttgctgtcttctctaacttcttctgtgcctgttcacactgtcccacacagttaacacattattatatacttctcatcgccaaagagtgggtcggctgttagctcctgtgcgttcttaaagtttcatctcggccttgagttagaccctcaggaagctggccggggttcctgtcctttggctatcagacattgtcttcctttgttacatatcttttttgttgttttctcccaatttgaacataagaatcatgaaagcctgtatggcttgttcagctgggtactggtatgccagcacaggacgtggcagatagtaagcaatcaacaaatatttgtcacaggatgaacgagaggcagacctctgttttcagaaaaggccagtcttttcccaacaactgcttgttctccccagtttagtcacagcacctgtgccacagccatgactttctctagggctaaagccctaaagaaagctagggtatagccctgcctataccctacacatccccggcccagcctcacttgccggccctgtttgacatctttgggggatgattcaccaggggaagcacagcctgtgaacaccttctctaatcctctagcctgattccaccctccgtgaagcttctccttgtcctgctggccagaaggctgaacactgaccagatggtggttttcagggcacagagtgggacacactggggaacgtctgcagggcctctgcccgagtgctgaacaggccagacagatacaggctctgtgtctcccatccctctaccacacctgagacattgttatttggagctgtgtggacattggggggtaaatttctaacccccagacctcctatcattctgcttatcctttctcatgccccaccttgcaaatgtacatttcaaaatcttgaaggaggagcatcctaataagctcattatggtgcaaggcatagcacgtgcagaaaatgctgtcactgaaatgaacttggacctagtattcctgtctctgaaatggactgaattgctaatttttgaaggatatggggcattattaactgtagtggtttaacctgtgaaattagtgactcttgagaaagcagaggctattgaggccagatttgtttacgtctgtcatccttggtgatgcacctcgagtgtgttggttacagtttctcttctccaggcatttcaaactctgaagctcatctgtcggtggagagttagctaacaggcaaagctcggatattgagactgcatctgcagagctcctgctggggatatgagaatactggctcttttccagacaaatgggagttagagccttttataaggactttccataagatctgatagtattttcatgcctttttggtttatctatttggtgtttttttaatttattttttgtgtgttaggcattcataacctcatgtaaattcttggccaataaaattgttgcttacttcattgtttgcatttctgtagtcctagaagggttgtaatcatggggtctggagttcagtctgcctggttgtaacctaggcacctcctgtgctgcaccagggccctgggcagatgcctcagctcccagagcatcatccccaaagggtcgattgtttctgggattaaacgaagcactcagacagagactggcagtaataggaagcttcatctgttttactgaggtacatacatagtttgagaaaacacgttgtcattctaacagtggttatcattgtaagagaaacattttaatttgctgccgttaagtagcaaggtaattattctgtcctttgaaacttttctgagataaagacacagctttccatacaaagatggtcatagcaacattgttatcactcacacaattaggaatcttaatgcccttcaaaagagttgctactgtgcttgtcctttcagtgtcatactgtgtagccattacagatatttgcaaacagttgtcaataaccaaaaaaagtgcttttgttttagctgaggtgggaaataagattggcactgaaatggataatgcaacatgacctcaactatgtaaatatccatagcaaagaaaaagacccgaggaaatagattgcaactccagcagcagtcatctctaggcaccacggttgccgtttctctttcattgttgtcaaagtttcctacttctctaaagtgaatgttacatttataatcagaaggttttattaaaatgggccgggtgagttggctcacacctgtaatcccagcactttgggaagccgaggcaggcagatcagttgaggtctggagttcaagaccagcctggccaacatggctaaaccccatctctactaaaagtacaaaaattagctgggcatggtggcctgcgcctataaactcagctacctgggaatctgaggtaggagaatcgcctgaacctaagaggcggaggccgcagtgagccaagatcacgccactgcactccagcctgatgacagagcaagactccatctcagaaaatgacaacaacaacaaaaagttattaaaatgtttatatctctgaggtggttgaattacctaatcttccaaagccctggaattagatacaccattaaaacattaaatcttaatccattcagcctttccccccattacattcaagcaaatgtatattgagcatctcttcctaaaacactgtgtaaaacggtgtgccagggcattgtgggacagaaagacgagcaaggtgaaggtgtaaccctcattgagctttggagcttgcagtctactgagtatttctgtataccagcaaaagacatttagaaaatgaatatttgaaacaatatcatttacaatagcataaaaaaatgtcgactacctagcagcaactctaacaatagatctgcaagattcctgtcaagtgagcatggaaacaaatgctgtaaatatcagaatgttacactattgtaaatatgtcagttctctccaaatttggccatagatgtagggcaagtctaagaaaattttagcacgtatttttgtggaaatgaagaaggtgatttttgaatgtatatggagattaaaagggccaagaataggcaatattgaaaaacagaaggaaagaagttggaagacttaattactatatggcaagatttactgtaaaactgcagtaatcagacagtatggtcttgatacaaggatagacaaatagatcaatgaaactggagtatccagaatgagacccacatgggtagtcacctgattaatgacaatggtggcgctggagtgcagtagagaagtgagggccttttctgtaaatggtgctgggtcaagtagatttccatatagaaaaacttaattttggccagtacctcatatcctacacagaaatcagttccagatgtactcaaagtcagaatgcgaagagtaaaacagtaactttgttagaagtaaaaagcatttccttataaccttggggtaggtaagaacctcttaagcttgatacaagaaacaccatccaagggaaagattaataaattgaactacattaaaattaagaacctctactcatctaaagacccagtataaagggaacgaaaaggtaagccaccatcagagaaagtatttgcaatatttatctccagtaaagggtttgtggtcagagtatataaagaaaagcaagaaaaagccacacagcctaattttaaaaatgggcaggctaggcgcggtggctcacgcctgtaatccaaacactttgggaggctgaggtacgtggatcacgaggtcaggagatcgagaccatcctggctaatacagtgaaaccccatgtctactaaaaatacaaaacaattagccgagcgtgctggcgggcgcctgtagtcccagctattcggaaggctgaggcagggaaatggcgtgaacccaggaggcagagcttgcagtgagtggagatcgcaccactgcactccagcctgggcgacagagcaagactccgtctcaaaaaaaaaaaatgggcaaaagacttgcacaggcacctcacaaaagaagatattcaaacagtccataaacatatatgaacaggcacccggtttcactactgaaagaaagcccccacgcaatatcactgcatacccagcagatggcgccaccgaccagggcaaagaacaccaagtattgagaggccaagaaacaaatggagttctcagacctttcttcctggccacaggtctgtgggcgagctactgaacgtcgccaaacctcacttgctgtcttgtcctgtgcagtggcaacagtgtgcacatcttcaggttactgtgagtctgtaggtcacatgaagccctcgcagagaaccaggcacgtgggggctcctagaatctttttttcaggacttaccgccctgccctctctgcctataagggccttctggtagttactaggtctttttcccccagaaattatttaataagggcaacaataacaatagctagcacttgtatcatacatagtaactgccaagttagttatctgttatctcccaacaccaccaaaataggtagatactaaagtattcaggtaccattgctgtttacattttactggtgagacaactgaggtgcacagagggaaagtaacctgctcaggatcacccagctaataagtgatggaggtgtgctcagacccaggcattccagtgtctgtgattaaccctatgttctaattataccagtgtttgtaattaaccatatactctagtgcctctcaggaaataccagactttctctacttcctgctctggtttcgctgaaccttcccatcacgactcctgccctgaagccctctttccctgtttgaatctagcctgatctcttttctaccttcctggaatattccttagataatgtagtaataatgtgaataacggcccccaccacaatgaccataatctaatcaccatggcagccaagcctgcttctgttgagcccttgctctgtgccaggcgctgtgcttggctctttctgtgcatggtcacgttgcctctctggaacaacccagtgaggaagccttgactgttcccaccactgtgtagaatctgagctgcagagaggtgaagcgccttgtccaaggccacagttaggaggtggcagggccaaaggtcaagcccaagtctgtctgccagactccgaagcctgacctcttcaccagagctctgtgctgtcacttgccgtgtctggcgtttggatccctggctatgttcagtcgtgtatgctttgatctaagttatgtttacaaagaccatcccctgccccattcagcatttattgaacacctgctgtgtatcagacatttggagtgtattggggtcagcaagatcaataaggtgatggtgctgaccttgaggagctcaggtctagtatgggaggcagatctttgcaaatgagggtgggctgtgcagtagcaaatatgtgtgggtacagaggtgccagtgaggagggaacaattaaatccacctgggaggggggcatggggaacgctttaccaagagatgcccgagctgggttttgaaatgtaaaagtttgctggatgacaaggacagcaagggcattctaagcagaaagccccatcaattgaagtcatgtggtcctaaagaatttaaaatttcttcttcttgttggggatcttcagagcagacccacccacctaagccaccgtctcccattgaccaggagtatgatgtgtgatgctaatagatgtacacagaagagaggagggagaatctgcccttctcccatattgccaacgatgtcttgtcactggcagggtgtcaggcacatgggggcctgcgtggagagtgtcactgatggccacagctggagtggtgcggtgactgtcagacttcagtgggattggggccctgcaccaaaagtccaattcaatgggtctgggacaacttacaaaggtgattctgatgcaggatgcctgggaactgcagtttggaaaactctgccgtttgaaactcttggggaagatgcacttgaggcaagatgaagatgtagatttgggagtgggtcctccaatgattcatcccagggtggttcaagtgctgtttgagttacctaattatagagggaaactgggcccatgccccctcccgcagccttttggtagatttgggtacaagtggttgaggatttgtgttttttgagggctcttctaattactgcatattaaaaattacatgcaatttctaataaattaattaaatgcttgattatactaggtctttaaagcataacaaacagtattcgtaaataaaccctagcccctttaaatagcagattgttctttattgtttcatcttcaggctgcttcctctttatgtcttacccgtttttagagattgtagatgggacaatcctatctagacgtttccttccttgctctcaccagacccccagccctgaaaactgaagttagccataaaagaaatcaggagaggagggcccttttcctgagtcacttcctcttggtgtctgcttttccttctcaagcctgagctcccttgacaggtgaagttacctggggctgtgggccctggagaagccatcttaaaagccgtgcccggtggcactcccagggcatccagctaggcttctggtccccgcgctgctcaggactggcctcggtgattcttttggtctcccccaccagcaaagaggccttgaggactggaaggtgtctacctgtctcagctccagcacctggcattcaggcctgtttgggtagatgaagtacagcaccatagcctctgcagcccttatttatttatttatttatttatttagactctcgctctgtcacccaggctggagtgcaatggtgtgatctcggctcactgcaacctccacctcccaggttcaagcaattctccctgcctcagcttccagagtagctgggattacagacttcgccaccacacccagctaatgtttgtatttttagtagagacagggtttcgccatgttgaccaggctggtcttgagctcctgacctcaggtgatccacccaccttggcctcccaaagtgctgggattacaggcatgagccaccgctcccagccagcccatttaactcagtgaatttaacaatctgttctcagcaaataagaccattgcccttgggctgcaaaccacccagatcatttgagccataagttctgatgggctcactgcacttgagaaggattgtgagcattccaaggggaattgcatgtgatttttgtcccagcaactgctgtgggacccagccttcctaagctgtggctccatctctctaaacctcaacattagcctggctgcaggccccgtgttaggcatccagcctgagctgtatgtccccacttgctctgaaggcatcaacatgatgggaagcatatgaaacaggtggctacttgctcttctctcagtcctgctgaatctgaatttccgagggggctccaggagcccccacttgattcagttctccgggtggttctcttgcacactgcagtttgagagtagttgacttcaagggtttgacgattttcttgtctccgtctgggttggtgtgtccttggtttaacccttcaaagcattgtctgctatttttctggggttgtgagttacatctaatctgaatgggaaattgcattacccaaacctgaaaaagcattgctgcattgtctccaaaatattgctaatggtcatggaacttggcttgcatttcagttggtaacctttaatttccttttctctcatttctctcaggtatctgtaccacgttttgaccaaaaacaccacagtcacagaacagaaccggaacctgctagtggagaccatccgttccatcactgagatcctgatctggggagatcaaaatgacagctctgtatttgagtaagggtttctaatgattgctgttctttgattattcttctttgaatgtttttctaaatgtatactatgagtcattctggatgatgtcaggatttgacgctaatttgatcttgcctagatatctatctctgtctagctgtaaaaaaaaaaaaaaaaatgcccttgaagcactatagaaatgcaagccaaaaatggggaagttatggaaatgagtgtctctagaaaacctgaaaatgtcatgggtaattttccttcaggttgtgtctgattattttcccaaaggaaggagaacatgtctggtggttagatttgacatgaacagaaggcctgtgccctgggggagtccctgagggctcccagttaccatgtttactgatgaccaggcacagggctgagctcctgatgagatggtccacctaagtttcccacccaccccatggtagaggccctgttggtgtccccttttttgctcaaggtcacatagctggtaagcggtggaaaagtgacacacccagaatcagtgaggggtcccgcaactcaccacttcctaggtgagcagtcctcagccaggctcttcatctccctaagcctcagtttctttacctttaaaagagagagaaaaagttctctttgtctagtgcctggtacaggaataaatgatagcaaatgataaagacagacatgcctcactggacagttaaaaagcaagggccgccaggcgcggtggctcacacctgtaatcccagcactttgggaggctgaggcaggaggatcgcttgagcccaggagtttgagaccagcctgggcaacatacagagacctcgtctctacgtataattaaaaaattagtcatgcatggttgtgtgtgcctgtgttcccagctactcagaaggttgaggtgggaggattgcctgagcccaggaggtccaggctgcaatgagccatgatcttgccactgcactccagcctgggtgacagagtgagaccatgtctcaaaaaaaaaatagcaagggctgttaactgtgaactacctccctaatagatctgccttgatgtcttagtgcagaaggatttggggctgggttatgacaaccactaaacacgggtgtgtgtgtgtgtgtgtgtgtgtgtgtgtgtgtgtctgtattataaatactgaggccacttttaaaactcatttttgaaaagtaaaagtgttctatttttaacctggtttcttattagatatccgaataagaaggatattaccttttcatggattcagacagaattaggcagcactgagcaagttcctgaatataggttcagggtagctttatattttcatcagcaaggttatccaataaagctacttgtggaaatgcagactctttaaaatgcaaacctgtaaacagtggctatgatctccaaagcagaacatgcgagtcatgaatttgtgtttatatacagacctagttcctttaaggatccatggggaattttgttttttttgttttgtgagatggagtcttgctctgtcatccaggctggagtgcattggcgggatcccggctcaccgcaacctctgcctcccagtttcaagcaattctcctacctcagcctctggagtagttgggattacaggcatgcaccaccacgtggggctaatttttgtatttttagtagagatggtgtttcgccatgttggccaggctggtctcaaactcctgacctcaggtgatccaccagcctcaggttccctaagtgctgggattacaggcatgagccaccgtgcccagctggaattttttttttttaaatatctttttggaaatcaaaaagacccttgggttaaagatgagaaactgtgtcccccttgactagaatggacttatttttttttttagagacagggtcttgctgtgttgccagggctggtctcaaactcctgagctcaaacgattcttcctcctcagcctcccaacatgctgggattacaggcatgagctactgcaccctgcctagaacggacgtgtcattctaggtcccaagatgacaccctgtccatctgtcatcttagaaaagctgctgagctcttagggtctccatgattcttaaacagttatccaacaaagtccctaagaaaattttgtttttactacattttaaaattttggaataattttagatttataaaatagtttcgaagatagtatagaatgttcccattgtaagtgtcttacattactggggtgaattgggcaaaactaagaaactgacattggtacagtattgttgagtcaacttcagccctcatttggattttgccagtttttcattaatatctcctttctgtcctagcatcccatccatgttcccatagtacattttgttgtcgtatatccccagcctctgatctgtgactcttttttagtcttccattgtttttgccaccctgaaagttttgagaaatgctagccaggtctcctgtggaatgtctcccaatctgggtttgtctcatgtttttctcatgattaaactggcagttaaggggaagaaagctataggagtaaagttcccctctcttgccatcatcacaaggcattcacaatatccacatgacatcctggtgatgttacctttatcacctggttaaggtgctgtctgccaggtttctctactataaagctactgtcttctcctttccccacactgttctttagaagagagtcaccaagtctaccccacgttttcatgatgagggggtgggggttaaggtctaccttctagaagggggcagtatctacatgtattatttgaaattcttctgcatggaagattcatctcttctctctcatttatgcagtcatttgcttatattaatatggactcgtggatatttatttatactttgggctataattcagtatgttgttattttattgctcaagttgtttcagccttggctattaggagctctttcaggctggttcttgtatcccctcgatatgctctcttccttttgttttttgagcacttcttacttcctggtactgtaaaatgctccagtcctacaatcacccttttttcccaatgaattgcccactcccctatggagttttaaaaaatctaggttcatggattttatgctagacctaccctgtcaatccccggggcaagatctaggtacaggcattttaacaagttcccaagttggtcacagtgcggcagtgagtttgctggtggcccttaggagtcactgatttatgcagcttgaactgaaggtagacaaaaataggccaaatgacagaaatactctggaggtcaacatgaatggcatttacaggcagatgggcctccgagttggagaagattgtaagggtcttttttaggccatttaaattttttcatttatccgttcatggattcagacagaatcaggcagcactgagtaagttccaggcccatgacctcaccactgtggagatgccagacgaggacagagaggcacccacaactgagtcagcccgcaggcacacctcatttcttccaagtgtcccagatgcaagattatctggtgttagcttgagtacagagaacacataactagaaacgtcattctcttcctttagagaaaggcactggatggtctgtttccttttcaagactgaaagagccaacgtgtacccccagaagccagtgccgctaggctgtgtacagacaagtatcctatccacaaggagaaaggcagaaacagacctggggatgggttagtagggtttctccaccacatcagtacctgtgtatttctttctagttattttcccctagaacttgacaatttgggagccacagtacatttggttgtcatatctccccagcctcctctgttccgtgactcttttttagtcttctgttgtttttacgaccctgaaagttttgagaaatgctggccaggtcttctgtggaatgtcccccaaaatgggtttgtctcacttttctcatgattaaactggcagttaaggggaagaaaaccgtagggctaaagctttttgggaacttttttttcttttttttctttttttttttttggctctgtcacccaggctggagtgcagtggcctgatcatatctcactgcagccttgaactcctgggctcaagcggtcctcccaccttagcctcctgagtagctggcacttcaggcatgcaccaccgcctaattttttttttcttctctgtagaggtaggggtcttgttattttgcccaggctgggtcttgaactggcctcaagcgatcatcctgcctcagcctcccaaagtactgggattgcaggcatgagccactgtgcccagatctaaaactcatttaatactcataattatatcttattcctttgctgggaattccagttgtggcgggtgacaatgggtggcatgacctgtgcagataccttgggggagaggggtgaatctaatacttgtgttgtgaatgaaaccagataataatttctgtttccacatgtggaagcaagccactgatgcttttccattctctccccagcttcttcctggagaagaatatgtttgttttcttcttgaacatcttgcggcaaaagtcgggccgttacgtgtgcgttcagctgctgcagaccttgaacatcctctttgagaacatcagtcacgagacctcactttgtaaggacattccttggtatttgcctctgtgctgctgtgcatgtagcagggtgaagttgggcgtggttttctgtgtctgcgcttactattcgtcggctcaggctatcctaacaaaataccatagactgagtgggttaaacaatagagatttgttttctcactgttctggagcattgaagtccaagattggccaggcatggtatctcatccctgtaaccccagcacttaggaggccaaggtgggcagatcacttgagctcaggagtttgagaacagcctggacaacaaggtgaaaccccgtctctacaaaaaaccacaaaaattagctgggtgtggtggtgtgcacatgtagtcccagctactcaggaggctgaggcaggaagattgtttgtcaaggaagtcgaggttgcagtgagccgtgattgtgccactgcactccagcctggggtgacagagcaagaccttgtctccaacaacaacaaaaaaaaaagttcaagatcaagttgccagcagggttggtttctagtgagggctctcttcctggcttgcagacggccaccctcttgctgtgcatggcctttcatctgtgtgtgagtggagagaaattgagagagtgctagctggtgtctcttcctccttctatggggacgccagtcctattggatgagaacccccacccttatgacctcattaaccttaattacctcgccaaaggccctgtcttcaaatacagccacaatgggggttagagcttcaatgtaggaacctgagggagacatagttcagtccctaagcctgtgtttgtttctgtgtggtgggtactatcagagggttcccctctgctgatgatgctgggggtgtttgcagttcttctttatgacttgctattaaagagttggggtcgctgaatcatcagccaatggaataagcactggaagaagtaagacaaggaagatctctgccagagggcaggcaagggtgtgtgcattggtaccaaccctcctgcttcagtccctccacccagctagtgagtgtgtgactccgaacttcttacctgccctcactaagcctcagtttcgtcatccgtaataaccacccctgagaggcaggtgccatcagtgctttcattttaacacccaggcgccagctctagcaaagccagaatagagaaggggtttcatcccaggcgattagctcagtggtcttcagtgaggggacatttggcatcatctaaaaacattcttgggggtgctgctgacatctagtgggtagagggtaggggtgctgctaaggacaggccccccacaacagggaattacccagcccaaattgtccccagtgccgaggctgagaaaccctggtttggttcctaatcctccacgctagactgctagctttgttattccaaggtgacttcaccaagcccgggccctgcccgccagaagtgggggacaagtggccaaatgtctatatcagaggcaggctctaagtccccaggacaggtctgaaaaaagtctgcagtgggcagaaagaggtagagatggtggcattcctctggccaagagggagaggtgaaagggctgctgagtgatggctctcgcagccgccgctaggtggtgctgctgcctcagagacgccttatgcttcccggtgaccgcaagttgacaaatgtgggccgactcctgtctccctaaatggtttcccttgttaccagcgcctgtttcactggatgtgaaatgactgcggtttctaaaagctctgaggggaagatccagctcagtggcacaggcccttgactcagactgaaccaggtcccaggcccagttctgccccacactggctccctgcacgtgcctggacagtgaaggctccgagctgctgtttgtgcatctgtcaagaggagagcacagtggctgcagcatagagtggctgggcgtgagcgtgagagcaggtgttcagagcgaggcacagggtctggcagataggacatggccatggtgtcggttttatcctttaaggcaacatcaccctcagtgtccctgccctgggaagcctctcaaagtccagctaggcacggggtgactggattgagatgggggtggggcgatcaaaacttacggcttttagagtgtttctctgaattatgtggcttttaaaaattgtatatatttaatgtgtacaacttgatttaatatatacatatacacaaaaaaatgtgtacattgtgaaataatcacggcaatcaagtgaattaacatatccatcacctcacttttgtgcgtgtgtgtgggtgggggttgtgtgtgcaccttgggtgatgaaaatatgcagtagatctgttagcagatttcaagtctgtaacacagtaggatgacctgtagtcactgtgctgtacatgagagctccggaacttactcatcgtgcgtcgtaccctttgatcagcgtctccccatttccctcctccccagtccctggtaaccaccctttgactctctgcttctatgaatttgactgtcttagattctccctgtaattgagatcatgcagtatgcgtggcttttcttgtcctggcaccgaaaagggtgccctgctgtgggaaacccaggcagatgcccctggctttatagccccttcaccacagtgcttttataagccctgcaaaaagggtagaaatcattgcacgtttacagaacttggatttgtaaggggtgaggaggatagaagacctttgcttttatttttgttttctaatcacagaagaaaaaatgtcctcattgttaaataacgaaaagccaaatgttagaaaaatgtaaagtcaagtttctgcagaattcaaccctaacgatccattgtgcaccagccattctgctgtttgcttttctttttcccaccttcccagtgtatcctagatctcattgtcccgttctgtaaccctgcctggtttggtttaggagtggcagcttgttgtgctataatctatttaacctgaccacgggcatttaggtggtttccagcttttcactattacaagctaccatttcacaaatgcacctgttgcctgttggggttagtgacctaagtgacagagtcccgagagactgagattacgtacaggctcccgggtttattagaaaaggataccacagaaagtcagccacacagtgagggggtagtagaaaaatcccagcctgataatagaggcacctccaactgtcctatggtggccccccaccacccacagagtcatctcttggaggccctggaaaagtccctgctggggagtggagggagcctgtcgctgttccagctccagggtacagctgagagactcacagttgcacatctgaagctcccagtatggtgtctgtgctgctggtggtctggaagccactagccagtcacagcagggctcagtaagacaccccaacagctccttatcctgccagcccattacccctccctacttctcccccagcaagagccagaatgacacagaaagaaaaagaagtgctctgggtatcagaatcacctgggtgacacgatacccatgttagactccaggtggataaataaactgtggactattcagagaatgtactactatatagcaaaaaagaaaagaaaaaggaaaaggaaagaaggaatgaactactaccattgcatacacagcaacctggaaagccctcagatgtggtaataagcgaaagaggccagacataggaagtgtgcgtactgtctgcttccattagataaggttcatggacaggcaaaacgagtctgatgtgctagaagcagaataagggttgcattggggtagcgggtactgactgggcaggggcatgaggaagtcttctggagagctgggaatgtcagatttgggatctggatggtgcttacaccgtgtgtatatgtaaaaattcatcatgctgggcacttagggttatgtatctatgtgttttatacgtagatatacccgaggctgggtactttataagggaaagaggtttcattgacttacagctcagcactgctggggaggcctcaggaaacttacaatcatggcagaaggtgaagcaaacacatccttcttcacatggcaacagcaaggagaagaatgagtgctcagcaaagggggaagccccttacaaaaccatcacatctcgtgagaactcactatcacgagaacaggatgggggaaaccacccccatgattcaattatctccacctgatccctcccacaacacgtggggattatgggaactacaattcaagatgagacttagttggggacatagccaaaccatatcatacatatatgtgtgtgtatatttccacatatgtcaagctgtccacttaggatttgtgatatacataaccccatctttaaaaacattaagattcctaagattctgccttagacccattgactccttgcttggagggatccccaagcactgcctcagtagtgttatgagcaggcgattttgaaaactgctcttctaagactacaaaccgcacagcctgtctgccatgcctgctcagagtgcacagtggcttttctgaatgcagtggctttcccggagaactgacttccaaggaggaccacgccacaggcccacactgtggcttccatcacgatcccgggctcccagattcctctttgtggtgtttttgatgattcccaacagactgttgagtttgactttgatcgacctcagttaggtacctcgacggctccaaataacttaatggtttatttcctcttcacccaagagcaactgttttcagtcctggaatatggtagagattttctttgtttgttttgtttttagagacaggtctcaccctgtcgcctaggctagtctccagtgatacgatcatggctcactgcagccttgaactcctggcctcaagctgggaccacaggtgcacaccatcacacctggctaaagctgagattttgaatctccgaataatagtaataataataagaagaatggcagttaacattatcgagtgcttgcattgcggcccatgctgtccattcacacagccagtgaatcagtgactactactactgtcctgagtgctttctgtgcattttctccattaactcttaccactacttcatgaggaagttttggcttcatgaaactggggcgtggggagggtcagcagtttgcccaaggtcacagcacagctaggaagtggcaggggcgagatgtggacacaagcaggccagtccaagtccacgattaaacccagagcttcccaaacactagcacgcatggggagccctgcacacttctcacatgcagagtgctgggcccacccctggagattctgactccgtggcgcagggccggggcccaagatcctacaggtctgacaagctccggggttgctgtgctccccatctgaggacaagactctgagtagcgaggctccaaaccatgcccccagcaggtgtgaatcgtgttctgcctttagctgtcctgggggccgggcaggtgagctggtgcagcactcacacaacattccaaaggacaggcgatgggacagcagtgcctgccttgcagggtggctggtaagaacacagagggaaatatgcctggcaagggcccaacactgagatatcaaactgcaggccataggctgcagctggctagtagacatgtttttgccggccagcacagctttaaaagctagttgatttcagtggcaaacatgtcaggatcaggagatgcagtgttggaatctggttttgcctctcttcactgttgaaagccctcaccatactggcctgcatttctgcagggccaggcgctgggagctggggaatggggttgctcttcagttgaccccagtgcccttgggccctcatcacccagttttcattgttgggcccccataatgcatgacaaactctgacatcagacctaagtttgaatcccttctctgtgactgtctctgtgcacgggtaagttaacatctccgagatgtttttgctcatctgcaaaatgggaagaatgagcaggatcatgtgatggttaatggtcatgtaaagcactcagcctagtggccggcatgtagtagggattcagcaggaagggacctttatgcaatcatgttgctatataaggaggaaaaaaaccctactgtggccttcagagttgatgatgtgatttgtgatggcagaagggggcagctttttaccctcattcatgggtggtttgtgaaaatgcccacacaccagctaatctccccctactcccagctctttgttgcactttgccatcaatgaaaagaaaatgttggagtgtcttttttttatttggtgtgggagggcggggaagggctgttctctggtgatgcctttgaacttcctggtgactgtacattgaagatgatctctttgctggttaaaagttaagctcttcccagttagtgtgtttaatcccagcaacccagaggcttacctgattcaagtacattaacgtggtcatctgcttgttacctggcttatctttcctccagcatgagttaacctgttttgtttttttctccctctagattatttgctctcaaataactacgtaaattctatcatcgttcataaatttgacttttctgatgaggagattatggcctattatatatcgttcctgaaaacactttcgttaaaactcaacaaccacactgtccatttcttttataatgaggtaagtaattgccagaggggcacgtgtgggtgtaaagccacacgtggctttttttttttttttttacggcagcgccttatatctggatggtcttgtgtctgtttacaaagctcttatatgcttgttatgattttcatggcaacacttttgactttggcatgtttaaaaaatttttttaattaaataagttacctttctattaaaaaaatgtaattctttgtagagacagggtcttactatgtttcccaggttggccttgaacttccggggcacaagcgatcctcctaccttggcctcccaaagtgttaggattacaggcatgagccacagcacctggccagcctttccattgttaatgtaaaattcagtttgttctgagagctttatacttggtagagaggagacatgcccagatgttgtcttggggaagtgttgccctgtgggaaaaacaggaactccagtcagggctggttttgtcacttccctgctgtgtcaccttaaggaagtcccagtccctttctgaacctcagtttcctcatctgagaaatggggataagaatatacatcttgtagggttattaggggttaaattaaatgagatgatgtcttcaaagtgccagtatgtacatagctccctaaaagcatagacgttgctattgttgataagataatgtccctgacattctttgggagaattattaaaatgaacaacttaaataaataaattgctcctgtcctcacacctaaaaggggtttgaacaatagggtcaatgtatcacccacaccaaaaggtccaggcactggtcgtgctggggctggttcatcctgtggttcaacagtatcagcgaggacccaggctttcccatcttgctgctctgctgactatacagctggcatccatcctcaggttcaacccctcatggtcacaggttggctgccactgccaaaatgcctgatgagatcacttcccttcttgtgtccctttttaacttccaaagaaaactttctcagaaggttctcaccagccttcccctcatgtttccctgcatcccactgagtacttcttaggtgtcaggtgctgggataagcacaagaccagaaatgatctcatttaatctggaaaccataaagtagatgttattatccccatgttatagatgtagaaacagaggtttagaaatactgcattgcacaggttagaagtggtagaatgggtaatgaacccaggtctgacattatctggactcattttctttttaattataattttcaaagtagagatgaggtctcgtcacattgcccaggctggtctcaaaactcctgacctcaagcaatcccccctccttggcctcccaaagtgctgggattctgggcatgagccaccactcccagccaatcaatcagtgattactactactaccactactactgctcttttttcttttttcttgttttgagacagggtcttgctctgttgcccagcctggcgtgcagtggcacgatcacatctcactgcagcctccaactcctgggctcaagccaacctcccacctcagcctctcccaagtagctggtactatgggtgtgcaccaccacacggacttggactcttctgtttcttccatggctttgccttcctgtccctttctacatgccccattgggaatgaaccactgacttacggttcacattggcaacatttttttttttttttttgtctttttctgaagtctctgatggaattcagagagttggggtggggccaggcctggcttatgggcttataatttgttttcgttatttcttttgttttagcacaccaatgactttgccctgtacacagaagccatcaagtttttcaaccaccctgaaagcatggttagaattgctgtaagaaccataactttgaatgtctataaaggtaagtgtcctcatgggcttgtgtctcggctgatttctgacttggcagcaagcactcactcccgtgtgtgtgcgtacagttctccgattgtcacgagggagcacattgatgatgagccgtggcagcttctctcatgaaaaacttggaatcccctagcatttagctggccgctcatggaaatccttgccttctccaggcatgtcgaagtcttgctcatgctgctacatagaagtaggatgtcctgagaggcacgtgtgggattcagagtggctatgttttagaatttgagaaagcaaagttgtctttttaatgtgtcatttaaatttttgtgtcttggcttgtgaaatatactttaatacagctaaggggtaatttgacttttaagtaatatataaaagcatgtcacattgtgaacagcagggggcaatgttgtattcccaacaggctgcaaagcccagcactaacaattcctcctttccctcaagatgttcttaatgcccaaaacattgccccagggaaaaagccattcccccactctccgctgcactgacacaaaggctgcctggccacaagtttcctgaactggaattgcccttccaaggcgatgcttggaagttctctgcctaattcctgggttattttccccggagtcaccacagtggagatgggactattttctcagggatgaaagggctttgactttcatgagccaaaatgttattactccctaatgagggtgggggcttctcagggactcactccagcctagcactgggcttacattaaatttaagaacctttctaagagcccaactggacccacccaggggtcgcaaactgaggacctgtgggccatatccagccatcagacatgttttaactggcttagtttttgaaaaaatgtgtagttgccagtatttaaaaattgggagatcttccatgataatctggatttgcaccttgaagatgtagatttggctagtcaaggcccacagtcctgcagttgggggggtcagctggcacagaagcagctgcccctttggggtcaaggcccgtgctcccaggtcacacgctggacctctggcaactagccaacgtggcaggcttgtaagattgtgaccctggtccaagccacagttggttctgctgcctcctgctctgttttctcctgtctccttctaaccttatctctctgtgcagatgcctcccaccctagtctctctccctctgagcagctctctcaccttcccaggtcctaaccctgttaactgttgtctgttttttgcttttccttcaatgacgattcctgtgttccttattccagtgtcatgtaagttattaacctctggttttctgctttcttaatctacccttatatgtaaataccttgcttgagaatggtgtaattctcagtgtagtctagctcagtctgctactgataagtaggctctcccatgcaccattaatgtttagcccaactaatttatttttaagtataaaatatcataagaactgccttgatgactatagttttatgaataagataaacatttttaagtatttccaggaaagacagacaatttcagattatagcagagggctttttcattgtggtttttgggttttgctttgtttttgttttttttttaatcttccccaagttatttttggtagcttgactttttttttcttctgtgaattttctcagtggataaccaggccatgctgcactacatccgagataaaactgctgttccttacttctccaatttggtctggttcattgggagccatgtgatcgaactcgatgactgcgtgcagactgatgaggagtaagtgacacccccagggccactcagtagatagacagggtggttaggggagaattctgttttcatcaaggaaaaataaacacaagaaccgcacttccctacctctgtgtaggcagagcatggacttccgtactgtaaaaggtcctgctcacctatttgtaataatgaaatgctggaaacaactcagacgcctcccagagcaggcggggtaaatcaattcagtacagccatagatggggctgctacgcagctggtgagaaggtcaaggggctctgtcagctgatgaatgcattaacaaaatgtagtctgtctgtacgatggaatagtgtttggcgataaaaaggaatgaagtgctgacacttggtgtggcgtagatgaacctcaaaagcattatgcctagtgaaatgcccagaataggtgaatctataggggcagaaagtagattcgtggtttcctagggctaggatgttgtgtggggacataggaagcaactgctaatgagtatagggcttttttttcttttttgagacagagtattgctctgtcacccaggctggagagcagtggggtgatcatggctcactgcagccttgacctcctaggtttaagcattcctcctgcctcagcctcccaggtagctaagaccaccaggcctgtgccaccatgcccagctaatttttttgatttttagtagagatggggtttcgtcatgttgcccaggccaatcttgcattcctgggctcaagcaatcctcctgtctcggcctcccaaagtgctaggattacaggtatgagccatacatccggccaagtaaggggctgcttgcttttttttttttttttttttttttttttttgagacagagtcttgctctgtctcccaggctggagtgcagtggtgcaatcttggctcactgcacctctgcctcctggattcaagtgattcttctgcctcagcctctggagtagctgggattacaggcatgcaccaccacgcctggctaatttttgtatttttagtagagacagggtttcaccgtgttggctaggctagtcttgaactcctgacctcatgatccacccacctgggcctcccagaagtgctaggattacaggtgtgagccactgtacccagccataaggtgcttttttttgcaggggggataacagtgttctaaaattgactgtgatcatggtcaggcaactatgtgactctaccaaaaaccattacattgtgtactttaaataattgaatgttatggaatgtgaattatacttcaataaatctcttttaaaaaacagattaggatggtggttttgtcctcaaagggatgattagaagttccagagcaggatttctttcccttggctctattgacctcttgaactgggcaccattgttgggggggctgtcctgtgcgttgtaggatttttagcaacatcgccagcctctctacctgctagatgccagtagcacccctccccagtcgtaccaaccaaaaatgtccccagacattgccaaatgtcccctttaaggcaaattcaccctcacttgagaaccactgctccagggtgacagctttgcccaggcctagtgagaggtgcacctagatggggtcaggatgctaaagggaccagggcagacccattggagcaattgggaaagctagaagccttatggatttaaacagtcatggatgcgagacataatgagacacttaactatagaaagaacaaagttatacaagcaaggaaatgaaatcatagtcctctatttggctccacagggaatgttatgacatcaaccccaattactgataactacttgtggggaaggggcagagagaatggaagagttctgtcataacaggaggtcaatagataatacctaaaatggctcaattgcaaaataggagtccatgcagattttctagaaatatgggaggaactatctgcagaaacaagtaactgcctctggacagtgaggagaagtagaggagggctgggtgcggtggctcacacctgtaatcccagcactttgggaggctgaggcgggcagatcacttgaggccaggagttgaagaccagcctggccccatctctactaaaaatacaaaaattagccagacatggtagtgcacccctgtaatcccagctaccagggaggtcaaggcaagagaattgcttgaacctaggaggtggaggttgcagtgagctgagatcgcaccactgcactccagcctgggtgacagagcaagacactgtctcaaagaaaagaaaaaaacagtggaggaggcgagtctgggccaggagctgctctttttcattatcagcttatcaatgctatttgagttttaaacctagctgcatatattactttgatattttttaaaccaaagtattaaaaagtgaggcactttaaatataccattagagaaaatgttccaaagtatcttattaagtgggagaaaagtgcaaaacattgtgcataaatgttctaggtctcaggcgcacggtgggttcatagacattcattatactgttaggctttacaacatgtatttgctgtaaatatttaccaaatatcttttttcttttcttttttgagatggagtcttgctctgtcacccaggctggagtgcaatagtgcaatcttggctcactgcaacccaatctcccagattcaagtgattcttgtgcctcggcctcctgaatagctgggactacaggtgcatgccaccacccctggctaattttttttttaatatttttagtagagacgggtttcaccatgttggccaggctggtctcgaactcctgacctaaagcaatctgcctgccttggcctcccaaagtgctgggattacagacatgagccactgcacccagctgaaatatcttgttgaagtataagaaataattggctgggcatagtggttcatgcctgtaatcctaccactttgggaggccgaggcagaaggatcacttgagtccaggagtttgagaccagcgtgggcaacatggtgagacccctccaccctctatgaaaaatttttaaaaatagttgggcattgtagcaggtgcctgtaatctgagatgctttggaggctgaggtgggaggatcccttgaacctgggaggttgaggctgtaatgagctgtgctcatgccacagcactccagcctaggtaacaaaacaagaccctatctcaaaaaataataataaataaataaaaggaataattatccagaattatgtaaaagaagcagaattgatcttgtttttactttttttttttcaagtatatacagttagacggatagaaatgtgacatctatattttagatgtgactactactaggagaggtaaaaatgtagaaaaaacagacattagggttataagtcccaaaatgttaatagtggatatttgttagtggtgggtttgagactttgaattctatttgcttttatattttaatttgctgttgtcaaaaatgatcatctatcagttgggtaataacaacaatacaaacaaaatgcctagctagcatttgctgcatactccttgggggtggtgaaagcatcctcaccagctgtttctggagtgtgagactgactccacccaagagacattaccccctggccccccatccccagcatgctgttgctaactgctgggagacggagacctccagggcaggggcctgggggaggggtgtcatgtctttgctctatgtctgcatgtcgtcagggccactggggtggccacggctctggaggcctgcttttctctttagaactcctctggagcattttaattacagtggatttattgctccattagtgctgcttatctggggagccaggggatcttgccacagtggctagtagctgtgcttatgcagtggcttgctggaagagtttagcagcattttgctttgtttacctcattctgggagaccccagcagtcccctgaaattgattttagtaaacctgcccattttcccttgtatatctccccagtaggggccaggataagtgtctcttgagactaactcaaatatgtggatgaactcacagtgacctaagtctcaggccattgatgttaggctcaaaggctcctagtgttggcctccaggctgaggtggtcatttctcctggcaggcatcggaatcggggtaaactgagtgatctggtggcagagcacctagaccacctgcactatctcaatgacatcctgatcatcaactgtgagttcctcaacgatgtgctcactgaccacctgctcaacaggctcttcctgcccctctacgtgtactcactggagaaccaggacaaggtgggtccagccccgtggctcccgctggctgaaggccatcagaagtggggaagaacagtccccagtcccctggaatggggctgagcattgcaaatcaggactgaggttttttttttgtttgtttgtttttaaaagacggagttttgctcttttacccaggctggagtgcagtggtgcgatcttggctcactgcaacctccgcctcctgaattcaagtaattctcctgcctcagcctcccgagtagctgggattacaggtgcataccaccacgcctgactaatttttgtactttttggaagagacggcggcatttcaccatgttggtcaggctggtctcaaactcttgacctcaggtgatacacctgcctgggccttccaaagtgctgggattatggccagaactgaggttttgagcccaagggagattcctttcaaagcacactggctttcctttcctttcctttcctcttatttcctgagacagagacagagtgtgtgtgtgtgagaagactataaaagtgaatgagaaaagattaccgacatcaggaggaaacaggaaacatctacaaatgtagggttttggtttctgtgcatccttccctgaagtgttctcctccccagtaacttttcctggtagttgccagaacccactgatttggagaagatacagacagcgacagaacttgcgcagcatggagggaagggatggagcacactcagggaacggtcccagggtggtgactgtccactgttagcaggccccagaggcctgtggggatgacggctggtaacatgcagggcctcaggaccaggaatctgcatgtctcacctatccctcaggtgattctgattctgtgctgctggttctcagggcccccctgtgaggaatgctgcttctggaggggaggcctctgtgcagttcctccggaggtaaaagggcctcagcaggaggcaggacagagccagctggtcaccatgcagaggtgctccaaggggatggagttttcaagattctcactacagatgagtaaataaaagaaagtgtatttttagtagaaacggggtttcaccatgttggccgggctggtctcaaactcctgatctcaggtgatacgcctgcctcggcctcccaaagtgctgggattacaggcatgagccaccgtgcccagccaggactgaggctttgagccggagggagactcctttcaaagcacgctgcttttcctttcctttcctcttatttcctgagagacagagacagagtgtgtgtgtgagaagactataaaggtgaataagcgccttagctttaccagaggcagctctgggaggcagagacaaagtatgagaattggagttttcagacctgcattcaaattctgcctcttccctttcctaactctgtgacctaaagcagttaacctgagcccgtttcttcggctgcaaaatgagggcctaactattcttctctaacagggtgggtgtgaaatggagcatcttgaaattcattataaacgaggggcttttccaaggccagagtgccctaaacctcctcccccatgctttgaaaataacttcccaagaacaggcctcctggaggcctctcctgccggggcgtccagtgccccagctggtacaaatgaacgtgcttggtaacttaaggagcaagttctcgtgggtcagcctctcatccgtgagtaatggtgaaaggtttctcagatggaaaaatagtgtccttgcaaacagtattgagtgggattttgcggagtggacttttgagtagcaccaagaaaggacagccctagggccgtggaggaagtcagtgggacaggacgcctttgttcacacagaaggcttttggctttgtgtattttgtgctgctcgcttgtgtgacctgatctctctctctctctcctgccaccctgcactagggaggagaacggccgaaaattagcctgccggtgtctctttatcttctgtcacaggtatgcttgatcattcaccaatgtccccactacatttggggtcccttggcgtgccactgccttgaagaaaatccccaggccttatcaccccatcttctctgtcccccccatgctggagtaaaataacagcaaaacagaaggggctttctgttttccaggtactaaatagaggtagtgtgtatctttttcatggtaggagatggaaatccaaagagaaatgaaaaataaaccaaacctaacttgtatagttgatttttaccatgaagactgaggtttccaaaacaactgaggagtgcttgaaatgccctggaaatgtgggctgcatcgcttttactcctgcagctttgaatgaagccccacactgcagaacccacagcgtgcatacacacagcaaccttggtgtaacaaacttcctgaaatgagtctattgttaaagggctttatcgcggttctagttcccagattaccgtgtggaaggaatcttgtagcaaccttagctctcagatttgtgtcttgagccaatttatctccctcccctccttcaacaagtgtgtttccttcatgtaattatgtaatatttacaagaagggaaaaactccatggcgacccagttacataactttaaaaatatttttattacaagcagtccagactctcagggcatctcattagactattaagtagtccagcatttacccagaattctgtttccgcttttgcaatggcacaggtatttatttgctttgatgaggaactgtccttctgacttgatccccagctgttttgaatttggggcggggctttgtctttttggcccaagaggagaggttcagaggccacctcctccccggcaggtaggccaatccggacatgtcctgaccatcactcacagcccagagtcctattctggggctatttgctcagagctctgcacgaggccaagtttgtctgaatgccgctctgtacgacggcgctgagcataaaccccagcctctcctggcagcttttttctgctgcctctttccaagtctgccggcatctcctgcttgagattctgagagtccaacaggacccaagcaagccagttctcagccccaggaatcatatggaaagcatcctcaggacccttcagctgttggagcattgcccgggcagggtctcctccagagagcatggccgccaactgcccacagcgggaacgtcagtggagagagttaggacttttctctgagactcctccctcaccggtttgctttgtaaaggaccagtagcccatgcacccaattacttgtttcagtatctcacagaaaacatagcttgtaattcattgttcctcaaacttgagtaatacatcccttttaaagataaacaacctgaagccctgtttccccctgcattttcatttagcttaatgaaaatgtgacctaaatgtgtgaaaaacctaaaatcaggtataaatcctgtgtcctgaaagcccctacttcaatataaaatcattgcatacttgcaaattattttacaagcatagctagaaaaccatgaaaatttttatggatgacgttaatttggtgtgacaggtgatgctgtcctcctaaaaccaaactgctaacagagtgtggtgtaggcagctgggcccagctttttgagtctggcctgcacgtgcttccacgtaccttacagttactcaccctccctcttttttgggttcagagccagggaaatgagcactgtgtgtgtccacaggcaggaattggttgctttgttcaggggggcctttgtaggtgctcactgaatgcttgtggactgaaaagaaggaataaatgatcagttaaggccgcattcattcaaggtacgtaacggatatttgagaatgaatgaccacagtgattggtgttttgtgttgttggtagagtgatgtgtggcagtaattcggccataaggaaggtgagaaaaatcatcattgctaacatttaagggcctgccaagccttggacgtgggttaactcattgaatcatactatgtggtctctgtgatagaaaaggttcccagtatttttttaaaagatgcaattttttatagggaggtgccacatggccattctgcctgtaccttttatctaatttgaattctatgtatttgttagaataatatattccccttgttcaaacagtacaaaacatggcatgtgaaaagtctctctcactctataccctgagcacccaactgcactccccagaggcagcctgtgttgatttttgccttcactttttaaaaaataattttttttaaacaacgttttttaaagttaaaaagttcaaacatgtaaaaaccgggtttctgttctagttttgttcaggctcctgacttctatccccagagacaattagggttacagggttctcgtatgtcctaacagagacatctgtcaggggttcttaactaggggcaattttgcccctcaggggatacctggcagtgtctggggagatgcattcagttgtcatgaccgaggctggggtgctactgacatctagtgggtggaggtcagggatgctgctcaccagcctgcagtgtctgggacagcctccctccatactcagttatagcccaaattgtcagcagtgccaagattgagaaaccctggcctatgcatatgtaaataagcaaatacaaacatgcacacgcttttctatgcaaatggtagataagccacaccctgtgctacaccctcttgcctttacattttaaaacaaaatagcaggcatgtctaggccagctttgcaagacagttttgaataccctgattcttaaagctggtcctctgaacattgggcaacaggtgtgggagcagggccagcttagcccagaggcagccctctgattttgcatcctggcccacctgggtttgcctctgtctcgtgtgattttcagccccgtagttcacatacctcctgacgatgctgtggaatccccgtgtgctaaaacccaccacagggtcagagctccctcccgtgatggaatctctgtgtagccaaccctctgccaagtccttgattggaacaaaactctccggccccttcttcttgtatcactaaagtattgggacagtgccttctagtcttctcataaccaaatttgacactaaaatgcccatggaaaggaaggagtgtgctggtttggctgttctttcccgcattgctccacttcagccggatttggcttcacccagccatgagggacagtctcgcattaatgcacttccttccgaggaagagcagccagccaaataggcaacagtctgaaggagagactgaccttacaagagtggaaccgagtcctgcttcctgtggctcattctttgaattttgcatcgtaggaattgctgcttaatacaggacttaggtagcccagcctggtcgcttctgatccaggaagcaagaggttgaaaataccgcacactttcatgcaaatcccgtttcttttttttccgccaggtcttcttaattatacatcatgcaccgctggtgaactcgttagctgaagtcattctgaatggtgatctgtctgagatgtacgctaagactgaacaggatattcagagaagttctgtaagtcattagcttcgggactgaccttaacaggaaaccattgctcattttgctaatctgtgtgtttctctaaaatcagaaactaacattctgaatatatagcagtgatgatgcataagctggtccgggattcagtgaacctaatcagagtcttgattgcatacccaagagaagctgggatcagggaccacctggatttgattgattgtgtgttcttaaacatggaattgtaccactccgggccttaggttgcatatctgtgagacactgttatcgggacacagtgagaaaatgccttatcagaggaactaatgtctacagaagttgggcgatgaacatccatgaatgactcaggccccaggtgagggcagtagagagtggcgaggggtgtggcaaattggagagtgtatgccaccttggcgagcagctcctgttctaccccaggctgctgctgttctgcaggaatatggatgtaggattactaggttttttcatgtttctagagaagcgggaaaaacgcattgttacgtgtaatctctagttttaaatgatcatcaagctttggactaagtagcatgtttgtggtctgcaggaaggagctttggcgttccatttggtacactgctgagggaaaacacctgatggccagtgttgtgacttctcttgaagcttttccatcttgtcctctgtatatctctgctgtcatctctcagatcctgctcacatgtcctgagctccagctgccttaatcctggtctgacttgcttttcccccagcatgtccagcatttgtgcctttgaacctgcgcctttaccgtacctacagcctggttcctgatgcacctggttccctcttttcaaaggtcttacccactctaagctccttatggcagggatctcacctgtcactgaatcagctgcagtctgggctgcacaaatgctcatctcacttatgcggagcccaggctgcagctgattcagtgacaggtgagatccctgccataaggagcttagagtgggtaagtgagatgagcatagtgcgttttatacaagggctgtttcataaaggtttcctctctgcagccaggtgctcaggcagtggccaggctggtaaaagggccagctcgccctggggtagtagatttgctgccccacctacatgaatgggtggaatgtgaccctgtggatgaaaggccaccactgcatggagtacaattacaagaggcccctgcccttccactggttttggtgtatgatggtctggccaggtcattttgttattcaggggagcattagcgcctctgaaaagcttcccagaaactctgtccttgttagtggtggtggcattagtgaattgattggggccttttcatggcccctgtctggcctatccctttcttgattcattcagcagtgttgatggagctctttctttgggccaagtatcatgctagttctggggatacacaatgtcataaagagtctgtgccgtattcgagctttacagtacagtagagaggtggacatggatcagatatgcaaataactcactgtcttaactcttataagcgctctaaagggaagaagtgtttggtgagaggctttggcctagaggtgacaggggtgatgtgttaaagattttcctagtggtccatctcatgacaacacacggtctggcaaatgtacagctgactcagagtttatggggccctagatatttctctgcaactttcttaaactagcgtttgctaaatgaatgtaagtcacggaaggctgagtcagcagaatcagcagggcctccagttagaggtgcagagtgccctgccagccacctggtctcgggcaggttgtttcactccatttagaaaacaggcagcgcaagccctgctctagagagctgatggagatgggggcaaaatataaagtgcccgctgggcacggtggctcacccctgtaatcccagcactttgggaggccgaggcgggcagatcaccgggtcaggagatcgagaccatcctggctaacacggtgaaaccccgtctctactaaaaatacaaaaaaaattggccgggcatggtggcaggcgcctgcagtctcagctactcgggaggctgaggcaggagaatggcgtgaacccaggaggcggagcttgcagtgagctgagattgcgccactgcactccagcctgggcgacagagcaagactccatctcaaaaaaaaaaaaaaaaatatatatatatatatatagtgcccatcaagtgcctgctgggttgcaaactggccaccagactcatttggtttggtctttgcagtatttaaaagaaaattttctgaattgccaacattaaaatttaggaagaaaagtccagatttttggaatcttctccaacagtcagaagatctggtccccatcaatgcacgtttctacgggaagcttcgcagagcctgcccccatcagatgaggcgtgtttaccgtgaaacctgcccactgctaactgggactacattgatgttaatatgttaatagcaactggagatgtactgggtccctcgggacttttttttttttttagttgcatgatttccaagcctgaggatagctgccgtggcttcatctcagattgtcttactgtaagataccctctgcagtgctgaagctagacttgtcgttctaagagatgaaaccagagattgctgggctctggggtttgcagcattgtttatttatttttatttatttatttattttgagatggagtctctgtcgcccaggctggagtgcagtggcgtgatctcggctcactgcagcctctgcctctgggttcaagcgtcagcctcccaagtagctgggattacaggcatgtgccaccacgcccagctaatttttgtatttttagtagaaatgggctttcaccatgttggccaggctgctcttgaactcctgagctcaactgatctgcctgccttggcctcccaaagtgttgggattacaagtgtgagacactgcacctggcctgcagaattttttttttttttttttttttttttttttttttttgagactgagtctcgctctgtcgcccaggctggagtacagcggcacgatctcagctcactgcaagctctgcctcccgggttcacgccattctcctgcctcagcctcccaagtagctgggactacaggcgcctgcccccacacccggctcattttttgtatttttagtagagacggggtttcactatgttagccaggatggtctcaatctcctgacctcgtgatccacccgcctcagcctcccaaagtgctgagattacaggcatgagccggcctgctgcatttttagagttgtgataagaacacaacatgagatctacccttttaacacatttttatttgtatggttaacattattgttgagtgtaggcacagcatcattcagcagatttctagatctcatttatcttgcatactgaaacttcagaagtacaatgtgctatccattgctctgtggagtcacctgcatgactgatacttcatacccactggacaacaactctccatccccccagccccagcaatcaccattctcctctctgcatgagtttgacaattttagatacctcgtataagtagaatcgtgcagcatttgtctttgtcactggctcatttcacttaatgtaatgtcctcgagattcatccatgttgtcgcatatatcagaatttatttctttaaggctcaatgtgtgtgtgtgtgtgtgtgtgtgtgtgtgtaccaagaaatataccacattttctttttctttctttatccatttatccatcattatgcagttttagtttttttgattttttttttggtgtgttttgttttgttttgtttttgacagagtctggctctgtcgcccaggctggagtacagtagcgtgatctcggctcactgcaacctctgtctccagggttcaagtgattctcgtgcctcagcctccgaatagctgggactacaggcatgcaccaccacacccagctaattttgtttgtatttttagtagagatgggattttaccatgttggccaggctggtcttgaacttctggcctcaagtgatctgcccgtcttagcctcccaatgtgctgggattacaggtgtgagccactgcacccagcttttatgcagttttttttttaattgaaattttttactgagataattatagatttgcgtgcagttgtaacagataatacagagagatcttcctcagtttcccccagtggtaacatcttgcaaaactctagtacaccctcacaagcaggatattgacagtgatacataggatttatgtttgagcaaaagcaaactgcgggttactggcaacctctcagtttaggacactggctgtagctcaaccatttagtcaggggaagtgtttaggagatctgtcctctctcctgatatggcctcttcttaggatgaaggtctcacctcccttgtgagagacacacaaactgcctttgggatgtaagagccagttgtggtggacacctgaactgaaaatgagactctgtagcgtggagggaattgctagcccacatgtgtcggctttctgcttccagttactacctttctctcagtgtgaagttgaagttggttgtaatctgatgactatcgttcaggtttgggaagagcacaggctgaattccttctgtgacttgtttgataatagtcctggtacgatttaccttccttccctatgagcgagaacagactcctattgtttcctgcccaactcggatgtggtttgattatacttgttttaagtttcttggtcttttttaacctactttctccttcccgtaatttgtagataagttactggtattgcctcatttttaccagcagacctttcacaaaaccaaaccaaaattgaagagagagaagcagaggggagatcacagttatttgaaaggactgtaatttagggttaaatggaaaacacatcagcatggttagatgaatgtctaattgaaattcatctgtgcgttaaaatcatatggttcctgctaaaggctaattcttgctataattcgaatgcagagcagatagtgtttcttgtgtggggaaatcgagtaggacaacactaattctgaaactgctaacatctcgttgtttttgcagaatgaacatatagattagaatttgggatatgcatcattacttgtaggtactttttttaaaggacttttttttcctcttgggtttctgtggaatggtttccttcatttttgcattcattcatttattcatctattcatccattccttcagcagccatctgttgtgtacttgtgctgagagatgagggatgtggtggtgcactggaacgacctgacccctgccctccctgggcttccctcctcccatgaggacagggaccatgtctcggagatgcctgtgccacctgtgccatcatggggcttgccagagatgcccagggaggtgttcggtgcaggagtgaatgactcagtgggtgaagtggtagcagagtcacaagggctctcgtgacattcttgtaatgactctcagagcagaagtcacttcctagcctgccccttgaatgccgccttctctttgcctcagtggctgggtttgcagtgggctgcttttggtgctgttccatgttccacctccagaggcagccttgtggagtgggtgctgtaaccagtttccctgggctcctcaaatcgtggtccctgattttactaggtgttcccgggcctcagtttcttacctctccagtgagaatagcaaacatgggtttatgatgagaattaagtgccgtgtaaagtgcttactccaaagcctttttatgtacacagcaagtgcataaatattagatgttatcattataatgaccttagttcctaaggctgcgcagtgaccttccacctcctacctgggaccttcttccctgggcttacgagctgtctctggactgatgaatgtggaaacagacaccatgcgcccttcagtggggtggcttttgagcagacaccaaggcacagagggagaagtgttagtaataacagtgatgatgaaacaccaatgttagccattgccattgagtgatggtaggtgaagccctctgtgtgtatactgtgtgtatactgtgctctccattcagccagacccagatttaatttctggaaagtgcaaatactgttgtcgttgttttttgttttttgtttttttttgagacaggatctcgcgttgttgcccagtctggagagcagtggtgtgatcctagctcactgcagcctcagcctccccaggtcaaacgatcctcccacctcagcctcctgagtagctgggactaaaggcacatgccaccatgcccagataacttttgtttttttttgtttttttgttttgtggagatggggtttcgccgtgttacccaagctggtctcgaactcctgggctcaaacaattcacccaccttggcctcgcaaagtgctgggattacaggcatgagccatcacacccagctggaaagtataaatacttaactgctaatgtgggttcatatggttggctggttgtgaagtcagggtctgaggattctggggcagaataggcttgcttatctccacataaggacattgacagtctgtctgtagataccagtttagcagttaggatggtttccagatgaatctctggacacctgtcacttctagtagcaggactctctgcccagccggatactcccccaggatatggtgtgtggagccagtggctaggaaagtagcagccttgcttctctgggttgtgtgtttgcagattcagagcattaatcgttgacttagctcccctggtcgctgctgcagggctttctttacaactcaaacttgtatccgatgtcagccgagtctcccgtgtgctgaatgcatcaggcaggatagcaccccttccggccaggattagagttcctgagtcttttagtgaccctgactgtactcatgatcccccagctaatcagtgctggttccaaggcgcgcacattcttcttcctgaaaatgctaataggcttctgggagaaggttgattgtgaatatcaaagggtaaagatagacttctataaattaagggccttaattgacccattgcagacattcccacaagggaattagagcttggtgtatattctcccttttggctttgccattgaggtctatcccctaatccctcactgcagttacggctctgaggtgccattcttgcccaccgaagtattgaatgtggcagctctggtctatgtttaagaggatttgatataatcaaaatccagagtgcaacatgaggtccggtactaaggagcgtatcgttgtctgagaaacagttgcgtctctctgtttcctggggcagaaggtgggctggacaactgaggagggtctcaatgtcccttagtacttgagaagggagcaggctttagccagggccgcgggtgactgtgaccaaaggcccggggttttggccttgggccagctagccagagaaggggcaggtgccttcattgctacatcctggagaagccaattggtaacaatggagtgggcacagtgggcagggatgggagcaggaggcagatggggaagaagccttgtgacttagaccctagctggcttttctatatctgtcctgcagtgtgtgacacagaatgggcttggggcagccacaaggctggaggcagctccatgtagaatggggaccttttctgattgcgttgggccattggtgacttcttctgggtttcaattaaaatcagaaaattgagggtgaggacagacaaatgaggtacatgccacttctggcctctgtcccctgtggcattgttagttttcatgagtgggccagcctcttcggatatttgtgatttttaacctgattttgagttacctgaagccaggtcagtattatttattcagatattcagcagataattattgggtatctgccgtatgccaggcactgttctaggccctggagatatatacccagtgagcaaaacaaaaaccttgacctccaggaacttgggtctcatgcagagagacagaggaacaataaagcaaatagtaacatcagggcacgttagatgtgagaagccctgggaaaacagtagtgaagcagaggatggacatgggcaatgctcggaggctggagtgttacagttctcagtaaggtggctggggttggccttgttgggaaggtgaggtggaagcacagactcaaaggaagcaagagagtgagtcatgttggtatctggaggaagagcattttggtcataaagaacatcgtgaacctgggaggcggagcttgcagtgagccgagatcatgccactacactccagcctgggcgacagagcaagactccgtctcaaaaaaaaaaaaaaaaaaaaaaaagaacagccagtgcaaaggccctgcggtgggatggtgcctagtgtgttggaggaacagcaaagggcaatgtggcaaggggatgggaagtaggagatgaggttggagagaacaagtgtccaagggacatggcacctatgtgccattggaggactcaggagttgctgtggaaggagactggaacctcttcgtctttgtgtccccatgtctagcatggttcctgcagtcaacgttgattgtcttgatgtgacaagtctcggtacgggaatcaaacacatatctctaatgagcggtggacatccggtcttggccagtgtcagagtccttgaaactggttttgctgcgggatgctttgcctgatgggagcctgagggctgcacttgagcaagaagggagcattttgctcacttctcagagacccctgccctttctgggcattccagcagagttcacaagagtggcttggtggtgtgagtcattcgtttcatgcctgagggcagtgcagctctcatccctggaggtgattaatgagtgggagtttccctagagagttctgaggccagttgagtagcagatcctggctggcctgaaattgattgcctgctgaccacttgctgggttgcttataacctggccccaggacagcttcctggtagcctccagatacgcacggggacaaatttgttagtttcatgggcaaagagaagaaaaaatacaataccttactgttaaccacagtcacccttctgtgcaatagaacaccagatctcactcctcctgtctaattggaactttgtacctgttgaccaccctctccccatcttccccatccgcatccctgcatcccctccctgcccagtctcctgtaaccactgttctcctctctacttctatgagatcaactttgtttagattccacaagtgagatcatgctggaagacagagttttgaatgttctcaccacaaagaaatgataaatacatgaggcgatggatatgctaagtaccctgatgtgatcattacatgacgtacacatatattaaaacatcaaattgtaccccataaccatgtacaattataatgcatccattaaaaaataaaaaagaaaaagataacattaaatggttttattcactcaaataatattgtgctgggtgacacttgagttctgggtgggtcattttctgacatgagcagaatgtgctccatctgtgaggcagaggctggctgccatacttacccttgtgcactccctgcctcgagtaattgttgagcccctacaagttgcaggcaggtgctgtgaatgaacaagacatctgtcccttccctgatgatctatttgtgggggatagacagtaagccagctcatcctcacaaatttaagatttggatatgggaaggaaatagaagcaactttgggaggtatgatgagggaagccctctaaggagggagcctaatattgagaactgaggtcagggagctaggcctgctgagagttgaggggttgggtcggggggcgtggccaaaacatgagaaatggtgagtcagaggcctctgtgggaaggagttgggtgtatatgggatcaggagagaggccagcattcaagaaatatcctgggttggtggaagagagggacggttttcgttttatagaagatgaacctggctgggcttggtggttcatgcctgtaatcccaccactttgggaggccggtgtgggcagatcacttgaggccagcctagacaacatggtaagaccctgtctcttcaaaaaaatacaaaaattaaccgggcgtgatgatgcgtacctgtgattccagctactcaggaggctgaggtgggaccatctcttgagcctgggaggcggaggttgcagtgagccatgatcacaccactgcactccagcctgggcaatagagtgagactgtctaaaaaagaaagaaaagaagtcaagcttacttgtttgtctcattgaacatctcatttcacgctcataatgaaagagagcgaggtggtgttattgtcacacgctccccataaggaagccaaggttccgtgattgttcctttgggattgcaggtgactagccccaaatctcacactgtttctattccaagtctttttatcaccacttgcaattatgttttccagtttggcatgagatgtcagggcagtgtagcattttgggctgttctgagtaacagaataaccagtgtttcacagttcatctttttcaaaatatagtaaaatactctttccaaagaaataccaaataagtgcttggtttgtcattgtttagtaagggagtgtgagatgcctcattttgtgtgattgaagaggcctgttcaatgctcgtgatgatcttgcaattaattcatcccacaagcattccctcttgattgaatgccagagacagtgccagacatgctgcttggcattgagagggacagagaaggtgacctgggatggggaaggcaagggagaggaggctggccccctacagacttagtgacacgccagaggtcactttccaagaggaaattgcagcaccatcttgacgttacctgctcctcatctcagcgtcaagtgctgagcacgcggctgcaagaggcctgtgagtgctgtgagtctgttccaattcctgagagatggacatttccttgctttacgcctctgcagctgcaacacttgataactggtaattcatggagaagaatgccgtgttctccttgttaatggaagcggcctgctacctttgcatgttccccactccatagcattcattttctcctttacatttcggcagtgccgtcaaatcgcctcactgatgttgcagctgtgcattcttcatgcatgttgggctttggttccacagctccacgcggctcctggattggcgagtaaggcatatgtctatacatcaccctggggtacatcacccatctggtgcttgcttgccaatcacctccttctggatgagaacaggttcactctgctgcactcatcacccggcttcctttttcagccagtggccaagccatgtgctacagtgctgttggttacagtgggtgtgacctcctgtgactttttgtctctgtgtttatcaggtaaaaatgtgaaaagatgtgtgtgtctgtggtcccagctacatgggaggctgaggctggagtatcacttgaacccaggagacggaggttgcagtgagctaagatcacaccactgcactccagcctgggtgacaaagtaagatcctgtctcaaaaaaaaaagtgaaaagagtcacattatagacaaccatataattgtcaggctagaggaccacctgttgagtgatgcataaactgtcactgcatttttgttgcaaagagctactgtttctctgattagtgtgacgtcggcatggcctagtctttacatcagtgctcccgggaggctggcccaacgttgggaggtgcagcaaatgcatatggaagggaatcgtgtttgagccatgtggcaggaaggttgtgcacctgggcactggggctagtttattcctgggttcaaatcctgcctctgcctctcactagtgggtgaccttgggcaagatcctcacctgtgtagttccttgccccatttggttatttgtaggataaagcaagacaatgtatataaagtgttcagagccatgctgggcacattttaagtgttcactgagtattcaggatggctgttattacctggaaagagtaacaagagtgtgccatctcttggcacctctcagcagcactgttggggagatgctaatatgatgcccattgatggctgtggcaactgagacctatagaggagaaggtaggaagcagtggagccaggactgaaaccacggtggatgggaccctgggcctctgaatcccaccctggctttgtaccttgctgtgtaccttgccagtcctggcgcctgaggccggagatggggaaggttagccaggggcccaggagcatgttggggaggctgagtctagcccactaacaaagcagaaggccagcgagcagtaagttgctgggagcttgggagtcaagtttaaagcatagaacatgactgttctttaaaagcccctcccctgccctctcttccatcctcgtgatctatttgccagggggttgaagggcaatgaaaatttctctggtgcccccttgtaccaggcattttgcctgttggatcccacactacccccatggtggcgtgtgatatggaactactcttgtctctgttttacagatgaggaactgaggctcctgtggtcagggtcgcttggctagtagaatgtgggtctcagacttggggccaggtctgcctgggcatgttttttgttagtcaccatggcctgtctcctttcttaaggggaaaacctttctcctacttctcaaatcgcttagcagagctgtttgaggaagcatcctcagagggtgagtaggctcggcctaggagagcctggaagggtcttcttagcttgattatcacaacagctttgatagattcagacagaatctcaggccctggaatctctccttcctttacctgatgcctctggccaccggtctctctttccttcgtgctcaaccaagattcttccctgggcaggctgcctggtgcccttacatcccctttcctggtcactcgccaacaactgctttctcccctccctgctgccccactgaatagatgctgagaaacccactcaacacgttgcatctatagggcattgagtcaaggtatctgatatctcttctgaggctgtgagcctgaagaacccctttgtgagcagcacgggctagtgcctgactgagaggctactggctggccggggaccactgccctgacttcctgcaaagtccagcggctgtgcatctgcccctacctggggagctggccgagcaccttgggtccaagggtaccaccactgtcaccaagcaccagccccaggtgacctaggccttagcagaagtaaaaggtgagtggcttctgggcacacctagagagctggctcctcctgggctctgagctggctttcctactattctttccttcctgagcatgctgctgaagtcctgttgacatccaagacttgtatcagtcatttcctcctctatcaagccgtcctaagctccccctatgcctcccagccctggcgcattttccctcccttcctctgcggccccatcactcttgtgtgaacctcttctcttccagcgtctgcatgggccatgtggcaataaatgcaggattcaccaggattcacctgtctggggtggactgtgggctctgagaggggtggactgtgggctctgagaggcgtggactgtgggctctgagaggcgtggcctgtggcttcctgcgcttacctgagtccccctcatttcatcagtgatcagtgaatccagctctcccacctgttcgctttgtcctaccttgtatttagggcattacagcaatccaacttcattgaaaatcctcttggtaaactttttggtgttttttgtttgtttgtttttgagacacggtcttgctgtgtcacccaggctggagtgcagtggcacgaccacagctcactgcagcctcaaccttctgggctcaagtgatcttcctgcctcagcctcccaagtagctgggactgcaggcatgcaccaccatacccagctaaattttgtattttttgtagagacaaggtctcaccatgcttcctgtgctcatcttgaacttctgggctcaagtgatcctcctgccttagcctccccagatcttgggattacaggcatgagccactgcgcccagcctgggaaagtttttaaattgaggaatcacataaatacaataaagtacataaaagtttagtaatcttagatgtactgcttgatgattttgtgcacatgattatattcatgtataattcgagtcaagatggaaaacatttctggtattcccataaagcccctcctcagtttgtaacccatacctccaccccacccaagagaatcaccatcctaacttataaacttgccttttcaaagttttttaaattgtgataaaataaacataaaattcactctcttaactattcttaagtgttcagttcagtggcattaatgcgttttgtaaagatgttctttacgtgtaaatagtgctggtaataaaagtttctagtgctggtaatatctaaatagtgctggtaataaaacaattgagtgatgtagacgcaggtagagcagaaagtgaaaggtcctccaacctcagtatcttcctcagagggaaccactgttctcagtttgtatattcttccagacctttcgctgtgtattttcatgtaagtatcaacccaggaatacatgatatgcacttatgtttcagccctatagttttggttttattttaaccataaactgaatcattaattgttgattgattgcaacttgctttttcttgtgcagcctgtgtccaggtctttgtaagctgctgtacccacacctggtggaacatgtttgtttgacatctgtcttctcagccatgtgtctcctctcgttcactcaggcacccagtctttggttgtttccatcctccctcccatcccattgctgccctttgcagtttctgcacacagattcctccattccatgaaagattgatccctggggattcacctttcccaaagtgtttgacttttgaaaaagcaaggaccaaagcctcaggtgaaggggttcaaggctgatggaagacgtcattaaccagcaggcaggtgcagacgcttagggagtagttaggccccggggcacctctaaaatgtagttgctgactgttagctggccctcaccccagaagccagcccaaatattcagctgcagagctcagggctcccttgtgtttcactgcagtcagcaaagaggctccttcccttcatgctcctcctgtagcccagcctcaggcacctgggagatgagcgcgtggtgaaacctaaacctgtggcatttgggacatgtagaccttctttgcagaatacttttccctggggcatgtgttgtgtactttctttatgagaaaatcaacccaaacgccttgtgatttcttactctgaagtgggcttttccacttctggttagtttgggtgagcttgctctttcattctgctacgtttagctcctgagaaagtttggctttttttccccttctttccctcccttctccttcttctccttttttcatcattctgtcttgccctttgggtacagcctggtacaaacattcattcctacagccatgagctcactcagcagcagcctgtccgcccctgctctggtccaggcaccgtggggtagagatgagagcacagtggcgagaggagggacaggggcccttctcctaggggcttcagactggagcatccttggaggctggcagccagaagcagggtgaccggagcaacagaaatggtcacaaatctctgcccacatttcccagccaaattctaccagcctctgcatgctaactgtgatgttttggtgttagctttaagaaaaaacaaaaaacaaaaaacaggtttttaaaatatagaataaaagggagcaaaaatagtccttagtcccaatgtccaaatgacccctgctgaatttgtattatgtatctatttatatgtatatgtttagagacagggtctcactgtgtggccccggctggtcttgaactactgggctcaaggaatcctcccatctcagcctcccaaagtgctgggattacagacatgagctccacacccagctgaatgtttaaaataaagttaatatatgttcatgattagaaatctcaaaccaaaaggtataaaataaaaaaagtgtgcttgtgtgggtgtgtacacagtgccactgctttttttaattcccccaagatgccaatacattcttaggcatctttccaggaaaagtcgcatttacaccatcacgtatagcctttgaaaagctttacttgaaagggaccctactgcctactcccttcctgcattttcatcctggtgctgagtctgcatcagtttatttaggaataaaaaggccccagtcttcttagattcccaccctttggacaaacagatcataattacctaacaactcccctatcaatggacatttaggttatttccagttgtttactggaaggtcgtgttataaaggtttgaaatttccccagtaagcatgccctcccacaccagacacctgatcactgagaaaagtagatccctttggaaagttttaaaattcattcttgcagctgattttttttttctttttttagatgtaagcaggaaaagaaggtaatgttttgtgttggatgttcaccgtttcggcactctctgaaggaactttattacttatttatttattttgagacggagtctcactctgttgtgcccaggctggagtgcggtggtttaatcttggtttacttcaacctccgcctcccaggttcgatcgattctcttgcctcagcctcccgagtagttgggactacaagcgcccgccaccacacctggctaattttttgtatttttagtagaagcggagtttcactatattggccaggctgctcttgaatacctgacctcaggtgatccacctgcctgggcctcccaaagtgctgggattacaggcgtgagccaccacgcccggcctctgaatgaactttatatccatgggttcctttggttctagggggccagaattactctccatgttttagaacaggaacctgaggcctaggacaggccagctgggttgggtttcagaccactctggccagccccaggcgctgagcactttatttcacttcgtcagttctgccagtttgttctgtatgtctgagtccacacagagcttagggaggggttctatatctgtctgtgtgaatttctgctcttaatttcaaactaggggacgttttgccctgcgcttggtctctattttctgtttctgaaagctttgattgctgtgtggccggctctgaaattcactaggagttggcagtgatgggaggaagctaacttcctgggtttggatgcttcaggagaagatgagagggcgactaggctgcattcgatcacccggcatcctaagtgggctctgatggatgctgtctgtcaagcagtgcattctcagaacgctcccatctgggggccctcggttattggcgtctgtaatacgctatctgggtttcctggacagtagaatcatgcagcaatttatgtgtcatttttttgtggttgaataatccacagtgggcaaataaaaattaatgtttatatttggatgctaattcacctttcaattaggttttgttttgagcgttattgaaattaatctgtgttccttgagcacatttccatttattggcaaggtacggtgttccccagcatataattggtggtcgtttggggtaaattcagatggataatctatatcaagataatggaaaagtttattttgaaactttttttaaattacaaaatgatatctgaacattatttcagactctgataagagaaaaacacttcaatcaaaatcccgccctaaacaaatcaattttcttctgtcttttgtgcctttctagtctgtttgcatgtctatacccttttttttttattttcttttttgagacatctcactctgtctcctgggctagagtgcagtggcgccatgttggcgctctgcctcctgggctcgagcgatccttctacctcagcctctgaagtagctgggactacatgggcatgccaccatgcccagctaatttttctattttttgtagagatggggttttgccatgttgcccaggctggtcttcaaatccttggctcaagtgatcctcccagcttggtctcccaaattgctgggattacaggtgtgagccatgtgcctggccttcctctttaaagagcattaaatgtagaattaagttttagctcctggtgaaacactgttcttttaggaagagtgtgagctttggaattggcaagccccagtaagccccaattcaaattctgactccaactcagtagctgtgtgacattgggcaagttatttaacctttctgctcctctattttctcaatgataaaaatgggactgataattcctatatattatggttgttataaagactgagatatactaatatgaagcatgaaccacagttgacactagcctcattctgtcgcccaggctggatggagtgtagtggcacgatctcgctcactgaagccttgacctcccagcctcaagcaatccctcccacctcagccccgcaaagtgctgggattagagaggtgagccaccacacccggccatctctgactttttaaaggaagaactttgtcctctggggcgagctgatctttgacttattgctgatacttactaggctccctttctaatgagagccagaatttgacaacacccactacacctggctttttctttctggttatttatgtttaatataatagcaaggcacgctagtgttccattgcctgtagtgatagttttgtttaaaatgaacttatttgggttaaaattaataataatatcagtgggctgtagctaagacacagcttgtgtggctggtacgtggttttgaatcccggctctgccacctcctggctgtgtgacctcgggcagatccttttctgtctctgtgcttcagtttcttcacctgtaaaatgaggatgacacagtaatatctcatgcagttgctataaagttcaagtgagatcatatagtcagagcctgagaacagcatctgacacataagaaagtaccacagaagtgttcatcagaagttctccttacacaaacagctaatatttggggagtgtagagctgctgctggtaaagtgcaccatttctgacttagggcagtagacagtaaatggtagctggcactgttgttttgattatttgatgatgatgttaataatgggcataataatagatctggaggtggcatttgttttggagattaatttctctttattaaaatatgtttttattgtctgtgttcatggggtaaaatggcagtgttgccacattgatgtattgcattgtggtgaagtcaggaccttcattgcatccatcactggagtaatgcgcactggacccaccaaacaccctcccatcatccaccccctccaagtccaccacccctcccagtctcattgtccatcatcccacactctgctgccatgtgcacatgttatttagctcctgcttatgagaatatgcagtaagtgtctgagttatttcacttaagataatcgtccccatgttgctgcaaaatacatgatttccttcttttttagtgctgaatactatgccatcgtgtgtatacatgtcatcttctttatctagtcctctgttggtggacacttaggccgattccatgtctttgctattgtgaatagtcccgcagtaagcatgcgagtgcagctatcttatgatataatggtttcttttggagatgagtttcttaggacagaaacttttgggcaacttgatagcatccagcaggattctagtgttcaaattcacctgttgccttcgttggactttcctaggccaagcccagcattcggtgcttcattaaacccaccgagacactcgagcggtcccttgagatgaacaagcacaagggcaagaggcgggtgcaaaagagacccaactacaaaaacgttggggaagaagaagatgaggagaaagggcccaccgaggatgcccaagaagacgccgagaaggctaaaggtacagagggtggttcaaaaggcatcaagacgagtggggagagtgaaggtgagtgtccccatgaacgccgccctgtgcctgcgccgccagccagcccgccagcgaggctgccacctgtgccctctccacccagacttctgctccccacagtgtccagccagtgattcgattcctacctcacactggcgtacctcattctatacagccctgccactcggaggctgctgtaggtgtatgtcatatgcaggtccagggcaagtcccgccctcatgggatgggtgacctggggccagttttcctcacctattaaaggagggtaacaaatagtacctactttgtagtgttcatacaagaattaaatgagcgaatatgtgcaatgtgctccaaacagtgcctggcccattctaaatgctgcaaaggcttcgatgctgcagaagtgttcgtcattattatgacagtaggagcagcatggaattattattatctttatccttattactgatataattattcccaataacctggggttatgatttgcatcctgtgcactgcgggaagaaagaggatttgtgtttaatgaaatgatatgcttgtaggccgagtgcagtggctcacaccttaatcccagcactttgggaagccaaggtgggaggatcacttgagcccaggagcttgagaccagcctcaccaacatgacgagatcctgtctctacaaaaaaaaaaaaaaaaaaagtgtttagtatttttaaaatactgaaaaatcaaatataattctctcaattcttacgttaaggttttttaagtcctgtctgtttagaatgaggtgcactcgtgtgtagtacgtatgtgctctgtaagcaaaatcattcattcctccttttgccctttttgggaattctggtcaatttttcacctccctctcgttgagatgctaaaaccttcttgaattggagatcatttactcttgggattaagcagaatggaactgccctattgcttgtgtcatgggccaggctcacagccacacagctggggtctctgcccgtcgtcctgggcactggggctgggggcagcgggaagtgatggggagcttgatacttggtagaagtggagctggggctcttctcaggaaggtctggccacactttctggaatgaacttggcatctcctcagcagtctggttgcagtctctgtgggtgtggggaacacttcctgtgagccctcctcctgggccttgggctcacagtggctgctctgaaaccacctctccacagccctgtcagcaaggactgcgtgagcttcccagtccagggcatctgaagctgtaacacagagccactcgttcagtgactgggagctcatttgcttttgggagttgcctgagattctgcagccaaagaatgcctccgccaccaccttgcttgctccatcatgactttcttggcagttgtcagtgaataccatgatcacatttcaacaagcgtaaccaaaatgtctctctggtgccaccgagacctctttttatggttgagatctccagcctcctcttatttctgtttaaagtgtgcaataggtgttttggtttaggaattcatttttggcctgggaagcctttgccaataaatatcactgtggtggggaggggaaggccaaacccaaggtaagccatgctaatttgcttattggggtcattctgattattttgttgttaatgctgaagaaaaatgtctgcctaatccctaggtttagttgttctgttgccacactgggggagaaatggacatcttcacctcattttgtgcattgtgttctcatcgattttgttttggaaagatgctacctctttcattccagtccttttaaggatgctctctaaccaggcctcagctgtgactaacagtggtgtggatcagacaggcttagccccaaaatcacaatcaaattagtcagccagccagcccagtcctggcacacaggggcttcaggccagttctgcaggctgctgtttcagcttgaactgcttgaattagagtaggggctcctggaagctgtgcccagctgccctgggcagggtacaagggaacgaatttctgccacgtccaaaagcctgttttccaggtggttacttagccagatcgtgccacacaggacccaggaatctccccagaggctttgcttgaacagttggtgcttcagggctcagtcacacatggctctcaatgacctgtgcaattttgatgccctcctaatttcttgagcacattagtcatttcaaaatatgatggatctgtcattttgtcactcagctcaccataaatacatacaactttcatagaccggtcctgccaggcaacagcacttgtattctggagctttctgaattatatatttgctctcttgattatttgtaaatgtgaaggtgcagttggtgggtgttctctccttagacggtatctgtgtttggatgaaactgcacagctgttaattcctgtgagtcggaagggtgtcaggcacatttcttcattcacattgcataccagagaacagtgtagatgctgggcagtgcctagaagatgcgagatctgactcgcagtcatgtctcagcatctaggtttattgtgtgtcttggatggcctcttgaagctctggacctcattgttcctgtctggaaatttctgaatatagaaaatataattcacatgatgactttttttttttttaagtgaagatacgttgatatttgcgattgcaagatttagaaatccaactcagactggcttaagcaaagagggtgtttattgttcatgttcctgggaagcttggacagggctgggcccaggtgcgctcacatcgtcccagcttggccagcaagtggagagggggcttctccttcccagtggctgccactgaagtcctggggccaatgcttgtgggtactgtgggcctgacttgggtcctcttcccacccccagagatattctggaccgattggcctggcccgcatgacaaatctatgctacagtggctccctcagtaaaaaatgagatgcgtttatcagaagcaaggggcagggatgctgggccagcagaaatagcagatttccccctagaaagtcacactgtatttctgggtactccccttctctctcaaggccatcttctgccatcctattttgagatagacatgcggctcttttctcttccacattatttcttctctagaagctcctttcattgtccctagatccacggacttatcgacagatggacatggtgactcttaaggaaagagatgctgacactctgcctctgcataccctgccaatcccattttagtagtgaaattttgactttaaaagacggggaaaatacaggagtaaaaaaggcatgtggtcacgaggcacagttttgccatgacccaatttggatatggcattagtgtgtattgttttgttgttgttgttgttattttttataaatgcagcacccagaattcacacctcctccagatttaagctcagacaaggaagttgtgtgaaatgaatgtgcacccctaacccatccactcccttccccagtctacagaggaatttgctctgcctcaggtcccaagtaatgggtgactcattctgcaaccaagaaatcacagggcccctaaatttgcagaaattaaatactaaaaaaagaaggatatcatcgtccctgtaggcaaagaagcattcactctgcccaggaaggcagacttcctagggtacgtgcttgttttttagcttgcccttgagtctgaaaggacagttatctcttttggaatttacttagagcagtaacttaataagcatatcctagggactgaatccttcaaactcctcatgtaaaaatagggctggactactgtttttttgcctatggaaaaagtaattgcccggactcaccttcaaagcctactcatttgttgaaattccagcaagggcatgaagtaaagatgataggcctttgaacctgccaggttagctgggtttgagagggtacctgggagtttagagacccatcttgcctttttctttttcttttggaagtctctactgaaatgggatgaaacctggcctcatttccagctcctctttcaaaattagagccagccccaggcctggcagtgtcttggttggggcaagccagggactgactatcggagagttgagatctgaatcccagctctgcccctgaacagctgtgtggctctgggcaagtaattgccctctctgcacttctccacctatagaggggacttcctaatgcctgggcctcagattgtcataagtgagaacatcaacactgtagcgttcagcatgtgacacaggagctttctacgaaccctggccaaggtggagggcagagtgaggcgctcgaacagcaatttgagtgtggttgcatgacctccacttgggcaccaagcacgtttctgtgggacccgtttctctgttaatttctacagctagtaagtgagcttagtgagtgtgcaggtgagtatgtgtgtgagagtgagtgtgtttgtatgtatgtgtgtgtgtaatggtgggaagagagggagaagaaggatcagcaggcccaggcgctgcagtagagagatgttgtggggctgtcaggttttcagatgggcttaactgggataaggaggagaattagaggtgaattaggacaaagcctctgaagagcaacttcccgaaaacagttctcaactcaatctcctgctgggcagtagaagataataaaaaaacaaaggaagggctgcccccagtacttagagcacttagcgcacacactctcggtcgttgtcaggggctgtttgcttcttgaaattctgctaaaaagccagccaattacatgcaggctgtcccttatatcctaggtaaccagccaggcatctttccccttagccttcctttgaaggtcttattcccctcttgccatcttttttcagtctgtccttgctgtgatcgctggaatatggaacacagagggcaactgagaaaatccttgaatttgtgaagtcaaagactattgggaggccatgcctgccatttccctgaaaagcacttcatttaccaaatactaatcagattcgaatggacatcagcccgggcgagttgttaaattattgctgtaatttgaaaaatgagtgtgtcagagtatcagggaagctcaagaatctggccagagctgtcatttagagaggcagaagtggacgtccttgggtgctgagggccctcaggactctcctggcccacaccagtgcctccccacataggcactagttggacaacaagtggaaagatgtggccttccctgctccctttttttttcctttttttaaacttatggtaaaatacgtataacaaaatttaccatctgaatcatttctaagtgcacatttcagtagtgttaagtacattcggctgggtgcggtggttcacgcctgtaatcccagcactttgggaggccgaggtgggcagatcacaaggtcaggagatcgagaccctcctggccaacacagtgacaccccgtctctactaaaaaaaaaaaaaaaaaaaaaaactagccaggcgtggtggcgggcacctgtagtcccagctactcgggaggctgaggcaggagaatggcgtgaacccgggaggcggagcttgcagtgagccgagatcgcgccactgcactccagcctgggcagcagagcgagactctgtctcaaaaaaaataaaaaagtacattcacgttgtataaccatcaccaccatctgtcttcagaatgcttttcatttttcatcttgtaaaaccaaaactgtgcccatttaataactccccaccccaccctttgatgttctgtctttatgggtttgactgctctaggtcgtttattcaaatggaatcatacagtattgtcttttgtgcctggcttgcatcacttagcataaagtcttcaaggttcattcatgttgtagcatgtgctggggatttccttctctttcttttttttaggctgaataataattccgttatatggctggactacatttctttatccactcctctgttgatggacacttggattgcttccacttttggctattgggaataatgccgctataaacatgggtatacaaatccattcctgcctttgaggcttttgtagaattgatagaggctgcagagggtctgggtggtactggccaaagcaaaatgagttggagatttgagttcctgctcccagctttgcagcctcatgagctgtgggatggtaatcacattactcagctcctagaggcgggaaacttcagttgtgtgatggcgccgtaccacctacaaggctaggcgctggagtgttggacatgacgggccatgctgcctggcatgggaactgatactgtgcaggcactcatttccacaacttaagggggcagtgcaaagaaaagagcccacagtagcctggggcagagactaatgccttggtacttcagtttcccctgccttaacatgcagagttgagggtacataagtatttctaccactgcagaatatagagatggttttagatggtacagggagagccttaaagaatacggtggccaggcgcagtggctcacacctgtaatcccagcacttcgggaggccaacacaagaggatcacctgagcccagaagttcaagaccagccaggcaacatagggagacccctgtctgtacaaaaaataaaaaactagccagtcacagcggtgtgtgcctgtagtcccagctactctggaggctgaggtggaaggatcccttgagcccaggaggttgaagctacagtgaactgtgatcgtgccacacactccagccggggtgacagagtgagaccttgtttcttaaaaaaaaagaagatggtgcaagagctctaattctaaatgattatctccatggcaggggatagggtgggtgggggagcctgcatatttgctgtgacaggtatttagtacttgaatacctctttcataaacatgaatctccctttcatctccctttctcaatgcacacaacaggccctagcacctttttgtttattcatcatgtatatttttgtagttgctttctatttatactggttttatgcttatggtaattttcccaaactttttatttgaaaataatttcaaatttacaaaaggtgcaaagccaaaaatagtataaagaacacctgtttaccctttacccagtttacccctgtaacatttcataccatttactttcctattgtattttctctgtctgcacacccgccccacacaccccacgcacattcatcgtgcccctttcctcctgaagcatcatgagcatttgctaagattaaggtgttctcattcatgagcacagcacagctgtcaaattcatagtattctcctgctgtgttcttgttgtattggcctaataatgtctttctagcatattctctcctccagtgcaaggtccaatccagaggcgggtggtgccttccgttgtcacgcctccagcctcctttactccggaacatttccacgatctctttctcttttgcgacattgacttttttttgaggaatacagaacctcctcctttttttgttctaataaaacgtccttcattttgtctttgtgtgatgtgtccttgtgattagactgagattatgcgttcttggctggaacacggcatgggtgatgtcatgcacttctcagggtgtcacatctggaggcacatgatgtccttctgtccctcttgggtgatgttcgttttggtcacatgactaaggtgttgcccagtttctgtattgtgtaatgaccttccttttcttcccaactaataagcagtccacagggagacactttgggatcatacagatattcagccccttgttaaaattcccccttagatttgacatttgttgatgattcttgcctggttcagtcactatcgtaatgggcaggaaaagatgattttccacgttcaacattctctctgtgtttaaaagtcagcccttggcattctgttgtaagcaagacctttcccttcttctcatttatttatttatctcttattggtgtggactcatggattccaattttctaatggtttatagtgcattactgtatttaattattttggtgcttaaattgtcccagagttggcctgcaggaaccctttcaagctggctgtcatgtgcttgcctggtgattttttgagcagtcacttacactttctggcataacatggtgttctgtgttcatctagtacctcctctgcctgtccttggaattaaccatttctctggctcctgtccatgggcaggggtattagaggccaagatttgggcactggatgtgctcatcgctactgaggtatctttgcagtttggccctttcagtggagaaagctaggaaatctatgtatgtacatatacaaagtgtacatttatatgtgcctacatatacatacatataagcatgcgtacacacacgtattttagaaatcatatgttcataccagtacccccaattccagtgaatttacaggttttttttttcttgtcctctcccatcttagatttgtatgtttcttcttgtacactgagagccctgactcctaacaacgtctactcactgatttgcccaatcttataatgcacctaaaagcttcagaattgcttcacttagagttgtttattgcttaaaaaacagttcaggatgtttttgcaattttccctcccccatgcccaccccaatactttacttatccccatatagaggatatatagctgagcacattaattcctcacttaacatcaaggataggttcttagaaactgtgaccttaagggaaattatgtataaagaaaccaattttaccataggtgagttgatatcaacaggagttaagttcatgtggcatacttctggtcacgaaaacatatctaacttctacataaaggcccaaaatacttctagcattaaacattgaaataaatgtgagctgtacatacacttaagaaagatttatgggccgggcacggtggcttacgcctgtaatcccagcgctttgggaggccgaggtgggcggatcatgaggtcaggagatcgagacgatcctggctaatacggtgaaaccctgtctctactaaaactacaaaaaattaaccaggcggaatggcacgtgcctgtagtcccagctactcgggaggctgaggcaggagaatggcgtgaacccgggaggcggagcttgtggtgagccgagatcacgccactgcactccagcctgggcgatagagtgagactccgtctcaaaaaaaaaaaaaaaaaaaaaaaaaaagaaagatttatgaaaacatgtaagataattacttacccgatttttggtgaattaatgaatgaacagcagtcatggtggtggtgggttaaatcaaggaataaatgtttgcaaagtgaaaaatcataaggagcacctccttcctgcacgaggttcaaaaccaatcacaaatctggtaggcttgttgaatgctttcataccacatcatttattgtcatgcatttgtattatcgtctactttatgaattgttatttgacaatcatttgtattcatttattttccaactcgcatatttccagtttaggatcttgtatgaccagtgcctgggtacttcaggacgccaggtgggagccaactctggacagggcaccatcctgtcacaggacaaactcacacgcccccacactcactcagactgcgcctgtgtggacatgccagggaacttaacatgtacatctctgggatgagggaggaaaccagaatatgtggcaaaaacccatgcagacatggcgagaacatgcagactccacatagacggtggccgggactgggaatcagtttttttctttttatcctcatccatgttataatgcaacaatgttgaatgaaatgatgttattcaaagatctgctgtattgtgtttataagctacttggattaatctgagcatccttcctttccccattcagagtggatttggtattcatttaaaataaatttggattcaggctaggcatggtggctcacacctgtaatcccaccactttgggaggctgagatgggcggatcatttgaaatcaggagtttgagaccagcctggccaacatggtgaaaccccatctctgctaaaaatacaaaaatgaggccaggtgtgctggctcacacctgtaatcccagaactttgggaggccaaggcaggcagatcatttgaggtcaggagttcgagaccaacctgaccaacatggtggagccctgaaaatacaaaaaaattagccaggcatggtgatgtgtacctatagtcccagctattcggggaggctgaggctggagaatcccgttagactgggaggcagaggttgcagtgagccaagatcacgccaccgcactccagcctaggcgatggagtgagactctgtctcaaaaataaataaataaataaaaatacaaaaatgagccgggcatggtggcgtacacctgtaatcctagctactcgggaggctgaggcaggagaattgcttgaacttgggaggcagaagttgtagtgagctgagatcatgccactgcactccagcctgggcaacagagtgagactctgtctcaaaaaaaagaagaagaagaagaagaagaaatttggattcttttttaaaatttccagtttaggcttcttctttctcattctcattgatttaattttcattttaaaaatgcatggaatattagcaaactgaagtatccttcctcccttccacttaattcctgtcatctcttatagataaccaacttgattgtgtactgaagaagtctccttcctgtgtttctttctgtaaaaataagcagatttgtgtatgttttcttcttttcctttcttacatacagggtagcatatgtgttccttccacttagcaatgtctccggaaattactccatatcatttctcagatcttcttcattccttttcacagctgtgctgtgtgtatgtaccatagttgattccatcggtctgttatgcctgggcatttaggtagtttccagtattttgcaattacaaagaatactacagtaaatatccttgtgcatgtgcagttgcatacttccagaggtgtgtcttgcggagaaagacctacaagtgggctgctaggttgtagagtataacggtgatttaaactttccttttaagctgtatttaagtgaaaaaaaagtaatagttcaaataaaatgaaaaatagtacaggtaacacagagacgtgacagaaatcataaaagcaagcaaattaaactattgcttcagtcccttcaaactccaaatagtatcataactgaggttcagtcagagccccctggaaatccagcctcagtgcctcagtcccggccttggggaccataggtggaactctgtatccacatagcctactgagctgctttccttggtggcagcagtgtggcgcccgcaccttgggagggaggctggccagtgacaacagggacaattggagttggggcccggagtggcacagaaccgtgccaacttcaggtgtagcactatgaggaggttccctgtgaccctgatcatcaggggaggtcaagtcctctttgatgtcctcttctaaagatgatactcactttagagcagtgagaatctggggagccctttcccccaaaaacctgctaccaactggtcccatgcccacatagcactttgcatagagcttcagggaattggcagacctataagggttgtttcagtacctataagggttgtttggataaaactatcaaaaagaagagcaagaaacctttccttgacatttgaagatctgatccgcattcatctagaaaattaagtggagccactcactctacagctgtgctagctggatgaggactgtgaggtgcagctgtgcgcacaggtgtcacagccagggtgtggaaatcccattttgtgtggagaggcccatgtgggtctggttctgcgtcaagatgtgacacgggggttgggggtgaggaagggggagcggtcctggctttgctgctgcatttccagctgtgttaagaatcactgcacttgtgggtttctgtgcactcatactcaatatccagggttggaccagacggtggttttcaagcagttttgtgtgaagccgtagaattccagaaaggggcctcatggagtgcacgagggagcccacggcagtcagaggcatttgatgcccaccaccctttcctggagcagctctgcgctcatctgctgactgtggtgggatgccctggaaaattgtcctgcaaattagtattcagctgcttaaaaaaaaagttggatgagcttggtgctgaattgtcttcaccctcttctctgctccggaattctgctggtgtccaacgagattaagccagaaaggggacaactacgtcacaaagcttggcctccaggccagggtgctggggcttggccctgtaaccttaggaagtacttggagctgagttcccactgtgtcaaccaagcagggcagagctgagcctggggaaggagaacttgcagctgtaggggaggtgggcctatgccacgtcctctgcctcatggggcagaggccagaggctgggagacgaggaggaggctagcctcacaggcttgcttgggagtcttcagatgtctgatggcaagccttgttagtaaacacaagcaaacctatacatatgacatttaagcatacatctcccaaatatgtgtaaaaatttatgtattataaattatatataatatgatcatgctagtattatggacagtataaaacaaaatagattttaaaagatgagaagcgttaaaagacctactgcctagggaatcatcttgcatgcccactgaggtccatacccactttggagatggccaaggtagttggaggacactaggtgcctgaaggaggctggtgaaggtgaaaatggcagaagggaaagagaattatgtttccccgacagcagtctgcaccacgttcgaactcttttttttctttttttttcttttttttttttgaaacagagtctcactctgtcacccaggctggagtgcagtggcccaatcttggctcactgcaacccccaccccctgggttcaagcgattctcatgcctcagcctccccagtagttgggattacaggcgcccgccaccacacccagctaatgtttgtgataggtttcaccatgttggccaggctgatctcaaactcttgacctcaagggatcctcttgcctcagcctcccaaaatgctaggattacaggcatgagcctccacgcccagcccacattccagctcttggccatatctgtgtactgtttgctctgctgtttactggatagctttctttgaattgactcacttgtttttttcccaaaatttagccttattctaagcactaatatccacagaaggctttctgtgcagctagaattttcttccaatgcacaatgaaataagtacaaaactatgcaaacaaagcatttgtccacacaccacttagaaagcactgttggctcccacctgtgtgatggggcccgccctgtgggagactctgatctttgacatctgacttcagatcagatgggagggaagggggatggtgagagtgaacctcacatagggccggggcccatgtgaatatcggggcgggggggggggtgctcctccatgccaaggggtgcctgcaggtacagtcatgcctaacagtctggggagagtctcttggggcatgagatatctccccacgagaacactttgtgaccacattgatcacagactttgtcggggagtggcccaccccgcctcagatcacagctaccatgaatcattgccactcgggcccgctgccaaaacatctcgtgttgggctagaccagtcgctcatttatcacttcaagagatacttattgtgtgcctactctgtgccagacactggattagacagtggagaacaagacacataagacagctacaaaacccctgttctagtggaggaaggcagacagtaaagaagcagaacaatagagaatgtaagagccaagtcacaatgaatgctattattattaagtaaaatcaagataagggggaggaaggacaaatctcctctacagaagaatgccaaataatttatggagatacgcgaagacgtttcagaacctaatgtcccattctctaagtgtggcctgtgtttactgactttcttccacagagtatggtatggaaggaggaggaaaagtgacttcacagtggcgaaagctgatgaacattagcttggccaagtattggagattaacatcaacagttataagtcatattgatagtatgtgccctgataggatgtgatgagaagggtacttcccctctgtggtcctcctcctcaaaacctgtaaccccagtctaaatagcagaaagacattgcacaaacccagagtgagggactctcaagaatgcctgaccagtactcctcaaaatgtccaggtcatcacaagcaaggacagtctgagaaacgtcacatccagaggaacctaagaatgaggactcaatgtaaaagggatcctggaacagaaaaaagacattgggaaaaactaatgaaatctgcccaaagtgtagagtttagtttagttaataacaatttttaaagaggtattaaaaaaaaaaaaaaaaaggcaggtgaaggccggtgtggtggctcacgcctataatcccagcactttgggaggccaaggtgggaggatcatttgagctcagaagtttgagaccagcctgggcaacatagtgagaccccatctctacaaatactaaaaaattagccgggtgtgctggcatgtacctgtgttcctagctactcgggagcccaggtggtcaaggctacagtgagccatgatcacaccactgcactctaggctgggtgtcagagcaagaccctgtctcaaaaaagaaaaaaaaaaaaaaaacaggtgaagagggcgtccaggaagatgtctccgtggaggcgacatgtgaactgagccttgaatgatgcaccccagtcacacctggctaggagagacctggtgtgagagccttccaggcagaggaaattactgtgtaaagatccttggatagaaacaagcttgggccaggcgcggtagctcacgcctgtaatcccagcactttgggaggccgagacaggcagatcatgaggtcaggagatggagaccatcctggccaacacggtgaaaccctgtctgtaataaaaatacaaaagattagctgggtgtggtggcgggtgcctgtagtcccagctactcaggaggctgaggcaggagaatggtgtgaacctgggaggcggagcttgcagtgagccgagatcatgctactgcactccagcctgggcgacagagcgagactccatctcaaaaaaaaaaaaaaaaaaaaaaaaaaatggagacaagcttgggatgttcaagagatagtgagaagcccagcacagctggagcagcatgagccagccaggcagggatggccaggaggtaaggtcagaggtggactggggccaggccgtgtgtttggatttcatcttgagagtgatgagtaggcactgggagttttgaacagaggagtgacatgagctaatttcattaaaatcacttgggtttgtgtggagaatacattagggtggcagaagaggtggcagacgtccctgcatgagccggggggagggagaccatggcagaggcggtgtctgagcccaaggtatgtgttcacatccctctggaaacagaagtgcaggttcacattttgtcatctcttttaaccccctgtatgtctcccgaaggtggggaaaaagatgtgaactctgagttccaaaggctgactgtttgaaagtccacgcccgcacagccaagaactctgatggggacaccataaagcccaaccctcatccatctttaattcaagatgttttctttggtggttcataactttttctgaaaaataaaaatgcacaccatgcttaagctgattgctacaggttacccttgtttaatggggagaaaaaatgaggttcctaatctctctctgccttctggaagttgtaagtaaaaaaggaaaacaaaaggcttcagtcacatcagagctttctattaaaaatgtaagcagctttaggccagacatggtggctgacgcctgtaatcccaacactttgggaggccgaggtgggtggatcacctgaggtcaggaattcgagagcagcctggccaacatggcgaaactctgtctctacgaaaaatacaaaaattagctgggtgtggtggcaagcgcctgtaatcccagctactcaggaggctgagacaggacaatcacttgaaccctggaggcggaggtagcagtgagctgagattgcgccactgccctccagcctgggtgacaagagcgagactctgtctcaaaaaaaaaaaaaaaaaaaatgtaaggagctttagaatgttgtcagtgaggttgattatgtttatcaaccacatgtcatatcttctcagctgcctgaaatcctttgggaaggaaatgtggtatcaataaagtaaaaaagacgattttaaactctcgaaatagaataaatgattgcaatttgtgttttgttgtcaaagacaggaacacgtttcttggtgttgctgtgatgaatggaaagagaggctctggcctctgtcttatttccaccccagtgtgtctctggtgttcaggtcgctgctgtcggacatgtgcttgatgtgtttggagtcatttatgcatatttattctccaacatgagcatgtgtataaatctagggctgaaaagctgtctggactcatcccagtctccattttggcttccagagatcgagatggtgatcatggagcgtagcaagctctcagagctggccgccagcacctccgtgcaggagcagaacaccacggacgaggagaaaagcgccgccgccacctgctctgagagcacgcaatggagcaggtagctgcccgagaggtcgatgctgagtgctctctcagggaagaggagagggctcagtggggaggttgagccctagggccagagcctcttctgtccctcagcccgaccatgctgcctccctttctttccctgcttctccagctctggccacccagaagcatggagacggagccatcactcaacactgtaatgctcactcctttgcaaagagattcgccaggatagcgcaactctctccctgccctgctcctggcactttggagcttggctctgtctaaaggacatgggttgcttcacattggctgctcctagaaatgctctgctgctccaaggaaggatcccctcagtagctgggcttggatctccctgcctggttcattccctgccctgcacacacaaacacataccccatctatagggcctgccctcttgacttggccacatgagttggtgctgccatccacctttgactttttgcctgattgttcatttcatcgatggccatctgtagctacatcttcttaaacctgggtgaccccacatttcctggaaccttgccatagcaccagcccctccacaatgggattggagggaaggctactcccagcgtatgctggtagctggtagcagggcttcatttcagagttatttccttacctcgcagccccactgcacagacccctgcaacagcctcctgattagcactaccttcctgttcataaatgcaccacaccaggatttctctgtcagcctgcgaggcattcacttcctcagcccctagggaggggtggtggaaatacacacggccccccatcctctttagtaatccaacttcaagtgaagatgtgaagtccactaatttttttcctccacatcttatttgtctctttgcttggcaaatgtttcaatgacttaacagatgggattaatttttatcagatgtgcaagggagccatttttagtttttgctaaataaaaaaacagtggagtacaaagaccttttagattttgcttcacagcaaaaaatgtaactcccaaagctctgaaaaataagtaattctaaacacagacggttggggacaaccttggcacagcattctttagactataaataattagaagagccccaaataaccagtagtgggatgttgcttaagcaaaggaagaggtatctgcttaatggaggattaggccaggcatggttgttcacacctgaaatcctagcgctttgggaggccaaggggggaggatcacttgaacccaggagtttgtgactggcctagtcacatagtgagaccccatctttacgaaaatattaaaaaattagccgggcatggtggcaggtgcctgtagtcccggctacttgagaggctgaggtgggagattgcttgagccagagaggtcaaggctgcaatgcactatgattgcaccactgcactccagcctgggcaacagaatgagactctcgctcagaatatctgctgctgcttttaggtgaatactgtcatgatgtgttcagttccttagggtttgataaatggaaacagagaacatacttttcgtagtatggtaatactgtggctttgctaatggaagagaaacacccatgtatttctcccgccaccaaaaaaagggttaaaaaaacagaccaaaatgttatgtttgaatattggggttgatgacttctttttttctgaattttggtggagagaagggttttcttagagttgattgagattgtttcttaactttgggcatcttgaagcacatggcttctaatggaagctgattcagttgccttgagttaggccgcatgcagtcctgggaacctccaggccagatttctgctagactgtgagactgaatgccgggttagagactggcccaggtggagagcagctttctcctttgtcaaggtatcgagttgcagcttgtaagaaactgccactgccctctgtccccccaacttgagcagttgggactacaggccagagtcaccatgtctggctaccttttttttttttttttttttttttgcaaagacaggatcctactatgttgctcaggctagtctggaactcctggcctcaagtgatcctccaatcctcctgcctcagccttcctgaggcagggagtgggaaggaaggtggctgtttgttctctaggctgtgaattggatcttggcgttggtccacttgccccaagaaacagcaaggtaaaaaacagactgtttttatattccccatatattatgggctctgtctgcactgggggttaaatataggcctaagaggccgggtgcagtggctcatgcctgtaatcgcagcactttgggaggccaaggtgggcagatcatgaggtcaggagatcgagaccatcctggctaacacggtgaaaccccgtctctactaaaaatacaaaaaattagctgggcgtggtggcgagcgcttgtggtcccagctactcaggaggctgaggcaggagaatggcgtgaacccgggaggcagagcttgcagtgagccgagatcacaccactgcactccagcctgggcaacagagcgagattccatctcaaaaatatatatatatatatatatatgtatatataggcctaagaaacttaaagctttcgaaacatcgtttcttttcttaaaaaaaaaagtttaaaattatgaaagtatgcaaaatcttaaaaagcataaagggggaaaaagtcttcactgctaacattcagaatcagggggactaccattttggttattttttttaccagtttttttttttttttttccgatgtgaactttctgggaatttcaccctcccttctcccagaagcttggaccgtattgtgtctataattttgtattctttttttccatctaatatcaactcccaagcaaacttttcaccttattctaccctgcgtaaacaaaacgcttaatggttttatgatacttcatctcataaaagatggtacccacccagctattggcatttggttattcatattattcccaaatgaaaatataatccaaatttcaagcagctgatttacaagaaaatgttatcctactcctaagtctggaagtgttattgctggaggctttcaaaacccaaatctacacatggcaaaactattaacacatctgaaaggtggtgccccatctggggctgtggagaaatggggatggaacataaatgtcccctttaagattttcattttttttttttagtttttgtgtgtcacgtgtgtgtttgaaatgttatgacaagtacatttttcctactttttttttttgcatttttcaatgaaatattttgtatcagagatacatgtatagagtcaaaaattcaaaactgtgtcaaaggttatatagtgaacactccctgtttctccccagtcccctttcactccccgtaggcatccaatgttcattggagcttgggtgtccttccagaaattaaatgtgcccttggtcactcatgaaggtgctctgttctcttggcctcagcctggcattcagagggggcagccacagacagtgggaggatcagagcctctggcctgtgggccagacctgtgcatattctattctcctggtgttgaagagtatttttctgtgaggcccttcacctggaaaggcagcatttgggatgtgccatttccgatttttgcagcctctctacagatctcacccacaaagcatcagaggtgagagacctcactatcgattcttcgcagtcagagaaagtcagcctgagaaattgctgggtcaggaccctgccaaagtgaaatcatgaagtagtgcccttggtatattaaaaatagaaatcaaatagcagctcccatgcattggcaccgtccacagtgcctgaccctgtgctaaatgcttttcagtcttcattgcgcttgaatcctcacaataatcctgcaaggttggactccaccccatacagatggggaaataggttttatgtgacttgcccaagggtttgctgaataaaaagctaagaagaggcagaatcagaatttgaacccagacagtctggcactagggctcatgttcttgaacttgtttggattgttgtttgtgccttgtgtgacatcacactgtcctgttttcttcattggcttgtgacacacatcactttgcattgatgtctgtttgttctgtgtctaccagctgacacgggagctttggtgtggggagtttgtataattgattccctgtgtctggaatacctggtgaatgattgttgtgtgactaagcaagcagtctgttccttggtcaggttcccctctggatagcggcttccccaggcagagcctgtctctcatttgtctgtgtcctcagtgcgtggtgctggaccaggcacacagttgtggcctaaagagctgtgtcaaaggcagctagcaccccatgtgcaggttagagaggggaggtgttcacccttgtgcaccgtgaggctcatacatgcccctcctcttttccagacccttcctggatatggtgtaccacgcgctggacagcccggatgatgattaccatgccctgttcgtgctctgcctcctctatgccatgtctcataataaaggtaagcacccttgccttgcctgacttccttgctgggccctgcatacccatagcatccttcccctctgctgcatggaggacaaagaaaggtgctttctgtacagaatttcctttctggttttggtggtcctttttggttttgactcccgctcctctttagcttctttagaatttctcaggtgtttttctaccaactgaagccacaggaattggttactcaggcaatatggaggaaggtgacttgagtgcctaacccaggatgactatattcaccctgtggttttcttttgaccccttgatttacaactgacttagcgtctgacctctttcctaacatcagaactgaaatcagtcaaattgtaatcttggttttgctatttataacacttggtgttcttattctgtgttcagagctgaaatagaccctgggtggacttggtggaagcataggtttcctttctgaagaaaggtgtggttctctggcttcccctattaaggctacttggccaggatccaactcccatggggttgacaggttttgttgggattcattcattcaccgccttgctgccgacccctgggaatagttactgttgtttgccccacctggcttgacatgggcacgttctgaaacctccacatcagaatctcttcaaagaagaattcaggaatattccttctaacccctgccaagagctaggcttggcatagtaaaaaaaatcaagtgatattttagtaggttttttataagcttattggggagtagatagagttgggttttactaagacagcctatggctagaggcattagaacatacatgatataactaagtttatgtgttcttaaatcattaatcatgataaataagttgattagtggcagaagggtatatagggaaaaagtttcccacctttgaccccagctctcctcttcaaaggcagttcctgctaccggtttctcttgtgtctttttaaagatagccaaacaaacccaagtaggagtatatatggttttatttgtatgactgcccacttagctgtaaatggagatacccatattgtgctttctaccttgctctgctcacatcatcatatttcagcacatgggttcacatccatagagaactgccattcttttttatcaatgtgtgagcaaatcatagatattaaggatttttgcatctatgttcatgactgatactggtctgtagtcttcttgtaattctcttgtctggttttgctatcagggttatgctcacctaatagaatgaattgagaaatattatcttctccttgattttctggaggaatttttgtagtattatttcttccataaatattccttaaaccagtgaagccatctgaatatggagttgtctttggtggaaggtttttaaccactcaatttcttcagtaggcatagggctttttaaggttacgtatttcttcttgagtgagctttggtaacctgtgtcttttaaggaatttgtcatttcatctgaactgtcaaatttattggcataaactttatgtttttcctttattatctttttaatgtctgtaggatctgtagtgatgttccctctctgattgatggtattgataatttaggtcttcattttttttcctaatcattttggctagaggattattaattttattgctaccctctattgttctgctgtttttgattttgttgatttctgttcttatgtttgtttggggtttttttttttttttttgccttctgctgcttccaatttaatttactttttgttttataacttcttataaagaagctttaggcattgtgggaagcactttattgtccacagccaagctgcttgtgatgaaactgtaacttacaagaaaagggctgggttttaaaaatgacacaggctctaaaaaccctggaagcggtgcaacttttggcaggaatgggggttagcaggacctcaatggctcactatggctaagtgaacgctgactgggtcctccagcgtgagctagaacagacgtctctatggtcaagtaaacagcgcgcgtgctgtctttcccatgtggtggggttgcgcatgatcagtagctgcaccactagaaagatggcggaggaagagcaaagaaaaatccctttggttccagaaaatctcctgaaaaagaggaaggcttatcaggcactcaaagccacccaggcaaagcaggaacttttggcaaagaaggagcagaagaaaggaaaagggctcaggtttaagctactggaatcattcctacatgattactggcagcagaaacctgacaaggtgcatctcagacgactagaagtgaaacctcatgccgtggaattgccagataaacattccttggcctttgttgtacgcatcgaaaggattgatggcgtgagtttactggtgcagagaaccattgcaagactttgcctaaagaaaatttttagtggtgtctttgtaaaagtcaccccccagaatctacaaatgctgcgtatagtggaaacttatgtgacctggggatttccaaatctgaagtctgtccgagaactcattttgaaacgtggacaagccaaggtcaagagtaagaccatccctctgacagacaacacagtgattgaggagcacctggggaagtttggcatcatttgcttggaagacctcattcatgaaattgcattcccagggaagcatttccaggagatctcatggttcttgcgccctttccacctctcagtggcccatcatgctaccaaaaatagagtgggcttcctcaaggagatgggcacacttggctatcggggtgaacgcatcaatcagctcatccgccagctgaactagacccaggtgccaaactgcagtatatttttgatcaatgaagtggaagcatgtgttttgttgttttgggaatttttatcaagtgtcttcagagaagattatttcctgctctgtcttcaaaaactggaaaggaagggtcaaagaaaagacagtagctggctgggcgttgtggctcacgcccgtaatcccaacactttgggaggctgaggtgggcagatcacttgaggttgggagttcgagaccagcctgaccaacatggagaaatgccatctctactaaaaataaaaaattagccgggcatggtggcgcatgcctgtaatcccagctactcaggaggctgaggcaggagaatcgctcaaacgtgggaggcggaagttgcagtgagctgagatcacgccattgcactccagcctgggcaacgagcgaaactctgtctcaacaaaaagaaaagacagtagcttatgttcatgtcaagcacctctcatcagagtctagttccaaggaaaaattccagtgttttctacattgggtgctgcgtcgtctgaaatcggcacattccatggaggaaggagtcctgctttgttgcatctatcctagggtttaatgttggtaaatgagtcactctagcatttgtacaaggctccctaagactcctgcagcagtcgaccaagcccaaggacataattgaatctggagagtcctggagccttgttttgaaaaagacttgaaatacacataggaagaaaggcataaaaataaaggttcacttgtctctgctgtggaaaaaaaaaaaaaaagaagctctaattattgattttaatcatcgtaggaagctttgatcattgattttttaagcaaatcagcttatttttttaaactaacgtaccataaaattaactcatttttgtatttaattctgtgaattttgggacatgtatggataggtgtgaacaccacttaatcaggagatagtacagtttcattatcagaaaaatatccctcaggctattccctttccagtcattgatttttaaacctttcttctctatgactttaatgctataaatttccctgtaagcactgctttacctgcatccagtaaattttaacatatgaggttcattcagcttaaaattttacacagtttcccttttgatttcttgtgttttgtcatgtgtataatttctagctgtgtttctcttattgatttttctcctgcttttggattccttcccccattttttgcatgcctggtcatttttgattggttgacagttactgtggtttttcacagttggatgctggattcttcctgtaaatatttttgggctgatggttcagttaattggagttggtttgatccttttttgaggcttgcttttaagctctgtgagagctggtccagacagccttcagtttagggctaacttcgccctattactgagacattacccttctgagactctactgtgtcccatggtgaggtggtctctccacactggcccccccagtgtgagctccaggaattgttccacaggcttcattctggcaggtctttccctttcttcatgtgcatgcacagaccagaacacagcaaggttctaaaggaaccctctgcacatgtctgagctctctctctgcagctctctcttcatttatcttgtccatgaattttaaccccttgatctccctgaactccagactctgccttctctgagagaaccacagtctttgggttttctatccctttgctgaggcccggatactctcactggacagcaagctggagcaatcactgggccactgcctttgtgcttctccctctcagggatctctctcttatgctgcctgttcatccagagtctgataaccattgttttgtatatattgtcttgctttctaagttgcctgaattagtaggataaattcagtccatcttggccagaagcatagcacctttaaagaaaaagttggattgaagtctaattgatatgcaataaactgaacatatttaaggtgcacaatttaatattttgacatatgtaaatacccgtgaaatcatcaccatgatcaaggcagtgtataatccagcatcccaaacatttcctcattcccctcccttgcttcccacacccctctccccaagtaacaccagtctgcttcctgtcatgctagattagttttgcactttctaaaattttgtataaacagagtcatgcaacatgtactcctcttcatgtggcttctttcaatccacttaattattttgagatccatcatgatgttgtgtgtatctgtagttcatttcttcttgctgagtaacattccattatatgaacataccacagtttattcattcatctgttaatggaaatttgggttgtttccagttttggactattacaaacaaagctgctgtgagcatttgtgtggccccatacaatgtatgcccatacagagagttgtatgagcatatacattcttttctcttggataaatacctaggaatggaatggctgaatcatatttcccatataattatgggagatatgtgtatgtttgcttttattttaagatactgccaaactgttttccaagatgcctatataattttatatcccatcaccagtgtacaagagttctagttcctttacctcctttccaacatttggtgtggccacctttttagttttcaccattctaataggtttgcagtggtatcttatgatcttaatttgcatatccctaatgacattgaacatcttttcatgtgtttcttttgccatacatgtctttgttagtgaagagtcttttcgaatccttagcccgttttttaaattgaattgagtaaaaaaaatattgtgtttcgagacttttgggtttttttgttttgtttcttttaagacggagtctcactctgttgcccaggccagaatgcaatggtgcaatcttggctcgctgcaacctccgcctcccaggttcaagcaattctcctgcctcagcctccagagtagctgggactacaggtgtgcgccaccacgcccggctgatttttgtatttttagtagtgacagggtttcgccctgttggccaggctggtctcgaactcctgacctcaagtgatacacccgcctcagcctcgagagttctttatgtattttgaatgcaagtcctttatcagaggcatttagcaatgatttcccccaagtctgtggcatgtcttttcattttcataacaacatcttgggaagaccagatgttttttaatctccatgaggttcctgtggcactttttaataccgccttttctctgtattttttctctcccattctggactgctaggccttggaaggcagaaaccatgtgctccctgcagtacccagcctaccgcctggcactcagtcagtgctcagccagagtttgctgattggttgctgctcagctatgtggcacgtccccaaggccatctcttcctggcagcttgtagctcagggcttcagcaaagaaggtgctgtctgtgtggtgtagatgccaggctccatgggacagtgggcaagctcctcatcttggtgactggtgttctccatgggcttccttcctgcagccctgacctgtacggggagcagagacgtcatggcttactgggtgtgctgccatgcaccttcatccatcttatgcgctggagagaccactcacctgtgttcccgcctgggcatcctacctctttttcttgggaatttcttcttggaagagtagaactgtatattcaaggaaattgaattccttctcccattttctgctaatgctatgcatgtattgattcattcattcttccaacaaatattttggaagcccctgttagatgccaggcactgggatcagtattggggatgcagtggtgaagcaaacaaatgctttcatggaatctggattctcttagaggagacagacagtaaactagtaaccaagtaaaataatcccatgtagcgagaagtgcaacagtgaaaataaaactaggtaatgtggtggggcaggctgagggtagagggtactacatccgcctgagcaatcaggagaggcctcttggaggcttaagtgatcaggaggaatagcttgcagtttctgatgaatttcctcatgtaattagttattcagcaaatgcatgtggagcaccggccgtgtgccaggcagtgtgctcaacatggggactacaaactccaggcagaccaacccaggcccttgcccaagaaagcatcagtcattcttggacagaaaagtcctacgaggaggctgtcagcacaatagagggtcacttgcctggtggtgagcatggactctgcccgcaggagtgaggacccgtttcctgaggacacccgggctatggtagaggacagagcaagaaggggcatgagagcctgtggcatatccatcagatcactgcccgttccctagggtgagtggcagcatgtccgaggcagcgggtgccccaagaggcaggcatctggagccagtctgcagggggtggcacaggcagcgactgaactgtgttcctatgagccgtgtggggctgctggggggcagttggtcagttagtgagctgacccactctgcacctctcagaatgggtttgcagtaattcagccagcgggtgggagggatgagaggtgaaactgagaggctttcttatcattcagcagatacttgctgagcgcttgccagggcaaggccccgtcataggcactcaaacaagcccagatgagtctcactgaagtgaacaagaagattaattgtgactgtgacaaatggtagaaggaaatgaacagggtggagtgatgaggaagcctagtggttgtgctgcaggggttactaggtgctagtcagggtggtcggggagggctcctctgaggaaggaccagcagagccacagcccagagagtgagaaggagccagctctgcaaagacctggggcaagagtcctccaggtgaagggagcagcatgtacagaggccccggggtgggaaggagcagaaagtgggccaaggtgaggctggccaggcgggcaggggccaggtcatgaagggccttgaaggccctgaagaggaattgccattttttttccaagtgcaatgggaaacccctaccgaatttttaagtaggacagtgatgtggtcagatggaagtttttaaaagaaacgttggctaccagacagaaagtagatgactgggggtggggatgagttgcaggagggaacaccgagagacttgctaagaagctgttgcagtcatccaggcgagataatgtggattggattaggctgctggctggggagtagaggaaactggaaggacttgtgattatttcagcgctagagccaggacgtgctgatggattgaatgtaggggtcgagtgaaagggacgagtcagatgactcctgtgatttggcttgagcaatggtgggggtgcatttactaggatgaggagacaaggagagtcactaggctaggggtgaggggttctggttgatttgaaaggagggggcatgaagggaggagcctgggtaaggctcaggttcctgactcctttccctgtgtgaccaatagtgccatttccagaactaacaagcatgggccttggagtaggtttggagaagaaacggaaaagttcaagtccggtgccctgaggcccaggtgcctggggaagctgcctcgtgggggagctgccacctggtttatgctcagtcctggcctgtgagcacagagtctgcatttggtggggctttgctggtggaggttggttgagtgattggtttttggttatgcagcagctgatcaggctgcacttgaccttcagcctcacttttccagatccttaccccccaaatcaggtcccaagtgacctggtctctttctcatagattttttcctcatagtcaattttaacataaaagccacgttcataaaaaccaaatgtgagctcaggccttccagtaatcataatagattagatgctgcaccgaaatgaatatcccacagtggaaagggttgaccggttggcggaaggcgcttgttgtgattcagttgggccacataatgaattctggtttgtttctgtaatagaaaatgcagccttcgctcttctatcaagtccgctgagtcctgggccagaggtggagggatgggggtgagttttacagcttttgtatcttgaaggttccccagttcagtgaccaaccttctactcctgccactccatttgtcattgtttacccaggaagaaggagtcttgggctctttgtgttttgtgttttgttttgctgagaagttaatggaacatggatgagcgatatggaaaaggttgaaaggtaataggctaaagggaagcttttgccatgcggagaacttgcacaacgtcagtttggatcttggctgacacataaccagaattagaagtacattggaaatcggcccaacatctggttagctttcgaaatctttggtctatagtcttccaaagctggtaatacttgtgtgactgcagccaaggagactttgtgtggtcaacagacgtttttaaaaagtttgaactgtttacctggtgttctcgtggtgtctttatccagatctgtctaattattcttatgcatctttggtctgggtcttttacctctctaccctaaatgggggctactactaagggggaagaatccagatatcagaactgagagggaagcttagtaagagttactgacactgtggggccacacccttcccttctgttttggattctttgaatgagttagttgagagttccgccctccacccctgtccacgggtggacaggggacacccgttctgagtcggtgggcagctcaggctctgacccctaaggcagggctgtgggcggggcagggaacatgtggtctgctggaagccagaatgagctagtgctcccgtgaagtgcagcagggtttctttggaatttgtctgtcacaaagcacttaagagttgaagcaaataggataatatattatccacagtgtttatttctgtcagagggaaatgactggcaaagaagctattgggtttgcagcaaaacctgcctttctgtgaccaaaaaccacggggtatgcatgcgtgtgtgaatgagtgtctgtgtgtgtatgagtgtgtgtgtgtgtttgtgtgtatgtccttgcacacaggagccgtcttacctttcacatgcatgcccctgttacagggtgacattgaccttagccactcagaaccatcagccaccaggttgtttcaggcaggaggcttaaacctaaatctaatgttcgccacaaattaaatgccatcctaagtacagtgatggtcatgcaatgattgttatagaaaacaaaaatgagaataagttgctttttcacttgcctttgatagtaccaccttaaaataaccaactgctgacagtgtcgtatttctttctagcatgttttctgtgtgggtgatggttgggcttttttgcacagctgtcatatggtggcttctattttacgtatgtttccccttcattttgagatttgtctaatcttctgcccgaaatttgatcaaaactacttaactttttaaaaaattaattcagcaaaaatgtatggactgttgtgtttgtgccaagaacaccactagatcacatgacatacatagcttgggaaggtggagggaaagagcgttaaccagcggggatcatggtacacggcagagaggagggaggtaagagccacatggctgcattcagggctgggctttccactctccacatgaccccaggcaagctcatgtcttttttgagcctcagcttcctcgtctataaaatggaaatactattagccacttcatggaatgtcatgaggatgaaatgaagcattctacgtcatatgcctggctgatggtcaccatttcttcagagcttaccatgcgaaggcaatcttgtcatcttagcagaatcctctcctccttccttccaaagacactctgtccttccccagagagactggtgattttgttgttgtttgtttgttttgactgagtattttggtaaatgataaggcctccttcaaaacactggatagttggagtcaaagagaggattttaaaggccatggtgggaaaaagagctgggagagagaatggggcccctggcccagaaggagctttggggaaagaagggagatgttcagaggggtttctgttatatagttttgccgtgtgctgtgtggaatcacctctgctctctgcctcccagggctggtggtaaaatctacctcacatggactgcatggcactagcaggtcagtttggggtaaagggccggaagcatggagaccacttggaacagtcaggggaatggaaccaccccagtcagccagggcacaaccagattatgttacggcccgctagctgcctctcctgggcccctccactgcatcaccctccaggatcctggcacgaagccttgcctgtcccttcccccatcctccacctcatcaccccctccccggctctctcccacccagacctctctgggtctgctccactccctgcagtcccaccttggtttggcaagtcctggccctccctgtccagttcaaggcaaactcctgttcatcctttaggatccaacctgagcagctcgccccctgagaggggcccccagcagctcagcatgcctcttttgggctgtctgtagcttgatttagctcttgttaggttttatccttgtgttcttttgttctaattttccttttttttttttttttttttttgagacaagagtctcgctctgtcacccaggctggactgcagtggcgcagtctcagcccactgcaacctccgcctcctgggttcaagcaattctcatttctgagcctctcaagtagctggtactacaggcatgtgcactacacccagctaatttttgtatttttagtagagacggggtttcaccacattggccaggctgatctcaaactcctgacctcaggcgatctgcccaccttggcctcccaaagtgctggtattaaaaacatgagccaccgtgcccggcctaactttccttttataacacgaatgataaggaaacacatgaagtcatgctcaaactaaaaattctcatccatgcattaagcagtgctcaaactaaaaattcccatttgtgcataataatgagagataaagttgttggcctgtgacagtgctttttctctttcgatcctgacagcagtcgtggggcgggtagttaccataattattcccacttcacaggtgaggaaactgaggttcaaagaggtaaagtatcaaaacaaagttcctcccgcaccccaccgctaggcttctcattcctgctgtacccagctgtccccctaagagagggtgagcccagggacacagaggggtggcttttgtcagcccaagaggacgggccccctgtgtgctcctggtgggctggctgtgtgggtgctgccaccctttcccatttggaccccacccaccttcgggatcacctgaaagtggtttgagctgtgtctctgacttgctctgtgaccttggggaaacaacataacaactctgggccttaacttcctcatgaaaggaaaaggctggacttggaacctggtacagagagaagtgtttctatcctctgggaccttcccttcacggagagttgagaaaagtcgagatcatcttgggacgcttttcttcctgtcaagaaaagagcttgccccagatttcctcactgtccacaaattctaaggagacggaggggcaatgataggaaagaaacaaaatggacctctctctggaaattcaaggcctggtcctagtttgcctctttccatggttctgtggccactgccccattctagaaggagcgagcagccaggccctttctgctatcctctctgaagcggagtgactgctgatgggttataaagttgggcaatgcacctgggacacagaggagcttttattccccacccccacccccacccccacccccagaaccactgactggcagttctcaaagggccagaaattaacgagtagagagatgttaggacagtgttaacatctctggaaaaaacaaatgccagaaagattcagttgacattcttcttgccattcaataagccagaatccttcagagttacacatttagcattaacatgggatacagaagccacaaattaaattttcactgcaatgaaattttttgaggaaacccacatttgtggggcgttttggggcatgagagagactactaccctactcaagtctttaggccgtccctcacccaggtcatctccttggtatgacttagcctctttctgggagctggaaggaattcagaaaagcaagatatattgttacttcttattacatcaatgtgcatgtgcaggagttacttagaatccagacaatcatctcttcaatgctatcttccactattttgtcaaggttctaaatgaagcgtcatctggtactcaagggaccgtattttaagagttccgagaagtgccacctttcccccttttgtagagtaacaggaaaagacgtggtacaagcgcaaataatccattcagttctccaagcttggatcaagcaaaatatttgtttctgtaagtgtatttttgaagagccacgtcagttgagcagataaggagtttgaagacctcttactccaggcaggaactgttctagtagccctaacaggtcttctgtcactgcaggtcctgtgtgcttctttaggagaaatgacaacagggctcaaagtcacacacttgcctgttcttctttcctttcccacttaccttccccacccccatctaatattttatctttcaaatgctgttagttttggcaggaagaattgttgaattttcactggaggaaaaatgattcccttgcctcttaatgatagatctctgctgtattggtgtcattgtattaggttggcacaaaagtaattgcggtgttccaattgcttttaatggcaaaaactgcaattacttttgtgccaacctaatatgtgcacctttctgtaagaaaggcttagcttagtgtctttctgctaatgtcaccctcaggggcaggcgtggcctctgcctcacctggctcacaacttgattcctcctacatgtgttgagggtggggctcagcttttgagtttgtcattaaaagcttgagggcacaattgttggggatgactgtatttccttcgtgtctagtctctctttctctaggcctggatttcctcaagcgtagaaggtgcgtaatacgggagtggcctcaggtggccctcagacctggcacacagtggcagtgagttgtgctatgggatggtgtcccctttttctactcccttccctgtgtctaggagaatgccaccatttggggctagcttctctccaacactattaagtacctgccaacctccctttttaacaaagatcaggtcttgggccaccatgagtaggcagtcaaaagtcattggctagcatgcaaaaacattttttgatttttaaaatattattactggcaattattgcatcaatcctgatttcctatttataagaaatagaaaatgtatgttttaatacatttatgtaagttcagtttatggagagctctgcgataagttatggcaccaacagcaaccagtcatgacagcagttgccaagaggggacaggcgcagtggctcacaacagtaatcccagcaatttgggaggcccagcacttggggaagcccaggagttcaagtccagcctgggaaacatgacaaaatcctgtctctattaaaaactaaaaaaaagaaaagaaaaaggaaaagaaatcaccaagagggaacatatgtggctgaagttgaggaaaccccactctacaggacctttcggtatgaggaggtcaggtagtcaggaggcctccacttacatccttctcctctgttccaggcatggatcctgaaaaattagagcgaatccagctccccgtgccaaatgcggccgagaagaccacctacaaccacccgctagctgaaagactcatcaggatcatgaacaacgctgcccagccaggtgcccacttggggtgttgtctgtccacagggccacgcagttgtaggaagcagaccccactgggagcctgagccctgggtgctaggcctgagccttctgagaatccgggcccatcccaacctctccctctgcctctcaacccctgcatcctgggccagccctcctgcctgctgggactgtgtcttagctctgggtctccttttgccatcccatcccctgccacttggtaaccatctttcttcttccacaccccgcccttcttttgctgagattgtcaatgttttcgcccccaccccgctatgtctgggtggcccaaggtaatattatgagaaagaactaggctgacagtggagtgaggggagaacattcgaaggtttaacgggccagtagacgtaggagacagagttttgttaccagcaacagttgtgggtaggtatggaaacaggtaggagtgagaatgcgcttggagaaaaactcacttggactgggcagctgaagagaggttacgctagtgctggggctgagtggggtggggccaggagagccgatggagccgagaccacccagtccttggtcatccctggggcttgtattatgtttgggaagacctattttttgtgatagcgctttttcttttcttttttttttttttttgagatggagtctcgcactgtcacctgggctggagtgtaatggagtgatctctgctcacggcaacctccgcctcccaggttcatgcgattctcctgcctcagccttctgagtagctgggattacaggtgcacactaccacacccagctatttttttgtatttttagttgagacagggtttcactatgttggccagactggtctcgaactcctgacctcatgatccacccacctcggcctcccaaagtgctgggattacaaggttgggccactgcgcccggcctgctgtttcattttttaggcagatccccttttctcacttattttcacctgacttacaatgcattaacaaagggactggcagggaggtgggcagaggggtgtatctgcctttagttttttcccagtgacctatcgtggtctctgatgtttccaaggccttagaggcatagcctgaaggcctcctcctctccacagtgggacctttcaccagaaataaacttgaaagacccacagaggagtttgcataagagcagttgtccttcagtcagtcagttacagatgcttctaggagagatgccagatgcgggttttggctttctgagcacctgcagtctaccactacccagctatgagacctaggacaagtcacttcacttttctaagcctcaatctttccagcactcattgcaataggtttttatagagattccttcaggacctatataaagtgttcggcactgtgcctcgttcacagtggtaagtaagtaatagcatagtaagtaagctgtgttagagctctcttggtcttgacagaaacccgactcactctggcttaaacaatacaagcagacaaagctgtgttagcttataaagactgctgaggcctagcttcaggcaaagctggatccaggggctcaaacagtatttttctacctttggcctctgccaccttctgggttgacgagataaatgccagcccctccagctagccctttctgcactgagactctagacttactctacgggagacacttagatttgaacagtctagttggaagagagatctcgaagtgatatttgtagaatactttactaagattaaaaatgctggcaagggtgaggaggtggccgatatagattataatgcttgtgcccctcagggcgtcaccacggtcctctgctcagcccggcacaaggagaatttctcttaacccagcagttccagcagattgtgaggttgagccttactggctctgactggctcccttgcctggttcttacctagtcactgggaccaagggaatatggagcaccccaactggccaggtgatgtgcccaaccctggaacggggaaggaggatcagctccacccaaatcacatgacccagagtgggactggcggctctctaaaggaagtgggggtgcagggccactttccaggcctcaacagtgtttagtcaccctctttttcctgcaccctgtcagtaaagggacttcagggaagtatttggtataggtagttttgatggagaacattgaattctaactgatggggaatggtttgggcatggggggttcccactgtgtccccactggatgttgggagccatgagcagttggtctatcatgtgacctgctagcctcaacgtggataggcagcagtcttgggtttaagggcgccccaccctgggtgtgcaaggcttaccctggtgtgctctgcagatgggaagatccggctggcgacgctggagctgagctgcctgcttctgaagcagcaagtcctgatgagtgctggctgcatcatgaaggacgtgcacctggcctgcctggaggtaacgccctctccgctcctccttcctgtgggccaagggagagggacaggaggacaggagggaagctgctggcatccagataggagccctggcccgtggtgtcatcggtcaccagctagaagcagcaggggctgctctcttgagaccccactccaacctacttattcagcagggacttcctttcagccgagactcgctgaagagtccacttaattgagttttagtagtttctgttgcaattatttgattctgtatttgtcctcaggatttctgaattttttctttggtattacaaaagtttttttgcacatacaaacacatcaacacacatacacacattgattatggtttttgtgtttaaaatatatgttaaattttcagtggcttttatggtacctcttattttctatgtttattttagaaaatttaggaagtagaaaggtaaaagtaacaactatagttgacattttgtctgtgtctgtgcacacacacacacatattatatatgtaaataatatatttaagtattataagcaaataattatatatataaagaagtatatttacatatacaatatgtaaatattatacactacgtatatttacatatgtaatatgtaaatatgtacatgtgaatatatgtaaatgaaacatctatttacatatgtaaatgaaaattcatttataagtgtgtatatatgtttgtgtatatatatacacacacacacacacatgcttacaaatgaattttttgtcttatacaaatgtagttgggccaagtgcagtggctcatgcatgtaattccaacattttggaaagctgaggtgagaggatcacttgaggccaagaagttgagactagtctggacaacatagtgagaccctatctctaaaaaaacaaaaaagattagccaggacatgcctgtaaccccagctactcagaaggctgaggctggaagattgcctgaacccaggagtttgagactgcagtgagctatgattgtaccaccgcactccagcctgggccacagattgagactgtcttggaaaagtaaaataaaaaaggagtcatgatggccatattttataacccattttcccccaattaactgtatattaacagcttctcatgccattacaatcgaattacctatcctttccccattttcattttgagctctgtctcctttcctctctctctcattaagaactattttataggccaggcatggtggctcgtgcctgtaatcccagcactttgggaggccgaggcgggcagatcacctgaggtcaggagttcgagaccagcctggccaacatggtgaagccccatctctactaaaaatacaaaaattagccaggcatggtgatgggtgcctgtaataccagctactcgggaggttgagacaggagaatcacttgaacctgggaggcggaggttgcactgagccaagatcacaccactgcactccatgcactccagcctgggtgacagaacaagactccatctcaagaaaagggaaaaaaaaaaacaccattttatacattaaggatattagtccagatctgttttatacacactcatgttttagaattcgtagtttgcccgacttgctcacctatatgagacctgcctccttcacaccttccttctcttttaacagggtgcgagagaagaaagtgttcaccttgtacgacatttttataaggtaattggcagagcacagatggacagcagcatggtgtgtattgtagaaacagaagtgtggtgtctggttctatgcagataaacgttatatgtcttcagttattttttatgcctataattactgaataaaaatgctcaatttcatagtccctagagtagcaatatctaaacttttctgtccaagctgtcttatcagtaaaatttttgaggactcagccccagtatatgataatttgtttctcagtaatacatggatttggttatttgggaataattatatgtaaattatgaactacgtacgtataaacacatataaataaattatatatgatgcacttatgttcataagttatatatgcttacacatataaaattacttatgaattacatatgaatttatgaaccatatacatgtatattatttatattgatatgtgctaagaaaccttatacagacttctaaacctctattaacgtttattgagattttgtaaagtgccaccatgactttcagtatctgaaaaatttgcagagctttgtcttcaggttccagatggttttataaatatctaattgccgccaggcatggtggctcatgcctgtaatcccagcactttgggaggccgaggcaggtggatcacctgaggtcgggagtttaagaccagcctgaccaacatggagaaaccccgtctctactaaaaatacaaaattaggcatggtggcgcatgcgtgtaattgcagctactcgggaggctgaggcaagagaatcacttgaactcaggaggcagagattgcggcgagccaagatagcgccattgccctccatcctaggcaacaagagcgaaaactccatctcaaaaaaaaaaaaaaaaaactaattgccgtggttttgttttagcttttaaggcatatgttttagtccatttgggatgctaaaacaaaacaccataaactgggtagcttataaacaatagacatttacttctgggccgggcatggtggctcatgcctataatcaatcccagcactttgggaggctgcggcggtcagatcacaagggtcaggagaccaagaccattctggctaacatggtgaaaccctgtctttactaagaaatacaaaaaaaattagcctggcatggtggcaggcgcctgtagtcccagctcctcgggaggctgaggtgggaggatggcatgaactggggaggcaaagcttgcagtgagctgagatcgcgccactgcactccagcctgggtgataggtgagactccatctcaaaaaaagaagaaaaagaaatttacttctgtcagttttggaggctgggaagtctaagatcaaggcagatttgatatcttgtgaaggctcactttctcatagatggcaccatcttactggatgacctcattacctcccaaaggccctacctactaatcccatcaccttgggaattaggatttcaacatatgaatttgggtggtggggggtggtggggagcagaaacactcaggccttgccagcctcatgtgtctttcagggaaggctcatcactcgtcagccatggtggattaatccataggtcaagtagtcattttctagtttgctggcctccggatcaggtctctgcagatcctgcgagtgatggtttcccctcttaacgtggctgatgaagatcctcctacatggggaaggtggcaacactgccatttccttgtcccctgtactttcattattcaagccctctttaagctgctgtttctttgcaggaatcgttttaagcgactgcattattgtcagtgtttgttgagataaaatgaggttatatgatttggagatcgaccttgccaggctcagatgaccccatccagctgcagcagtggacatacccagacaagggtggcaccgtggtgggcccctacacactgaggaggaaatcccactttccccttagaacatcccaaaccgcacttggcctccaagtgaggatacaccctcactagcaaagcccacgagaaagcagaaacctcagggttgcattagtcatctttgaacctctttccagtataactgccctaagtttatgtcctctagaaagcttttggattgcaaaaacagaaagacatataggtaggcattttcccagagggttattctttattattaacaaaaggagagctttatttaaattctggatcccttctcccaacccagatttttcttacttttatcccataacatttattataccctaagtataatttctcagcagcttttagatgttttcaggaattgtctttcctggtggtggtagttatgtcacacaagaatattcaaatttagttgtagttctgacaactgaaaaaacctaaaaaggatctattccctttcccaccccaagtgtggggtgtgtgtgtgtgtgtgtctcattcagaacttgtgagagagatgcagcagttctaagggtcattgtccagtagagattaccatgacagtgagtgctcacactgacccaaccctgaacgagtgacaggttctgtgcctcctcgcatttcatgtgcattaactcatttcatcttcacaataccctagacagacatgccattcatgcagtggaacaaggaggcgagaggtgtaaagctggatttggttatgtgtatcagaaccaagactatgcccaccgtgctgttctgaaggggccctcccaggcagtcatgaccctgaggaacaacataaccccgaaagcactcctcataaacaaatagaacaagccatgtaattgtaatgttaaacttatttaattatactcttccttccagaggtgtggagccttgtatctttaatgtggtaacttaaacaggattgtccatttctccagccgttctcgacaaaatagataatgttaaacacttgaaatattagccttttctatattttaatcctacatagtagttttttttttaattaactgctttgacagaagaattctaactccatatacttaaaaaggaaggagaaaattttgaatagtgcaatttgatatttggtctgtcatttgagcgtgtgtgtttgtgttcacgtgtgcattttacttcctggtgatttacgagaactcactaatgagaaacagatggcctctaaagccacaaactagagtttataatactctgttgtttatggaaaaaaatatgaataatctcctcttccctcccttcctttctttttagggagaagacatttttttggacatgtttgaagatgagtataggagcatgacagtaagtgaggggctgggacacacttgggctggtgtgcgcctgtgtccctgccaagctccccctgcccatcccagagggagttttttgacttagggctttgtgaccaaatagcacagattgatggggaagcagatttagaatggtgtcttgtgatccccaccactgttaaaatttcagactatattctctccctctaacatgggaggtgtccgatgaatcaggatgattctctgctatgaatagtaattttggggacagtatcattttattgaggacttactctgtgctggatgtatatagcatgctgtacagattatatctcttcatcctcacaccaaccaacggtaatagctactgccattgtccctttcttgctgaattagtctcttctcatactgctacgcagaaatacccaagactgggtaatttataaagaaaagaggtttaattgactcacagttccacattgccggagaggcctcaggaaacttacgatcatggtggaaggcacctcttcacagggtgacaggagagagaattagtgcaaggagaaaagatgccagatgcttagaaaaccatcagatttcatgagaacttactcactatcatgagaacagtataagggaaactgctcccatgattcagttaccggcacatggttctgcccttgacacgtggggattctcatgtgtctcaccattcaaggtgcgatttgggtgaggacacagagccaaaccatatcacttgctaatgaggaaactgagtcagagaggtctagtgatgtacccaagtctgcccggccggtgagtggcagagccacgcttctagaggaggacagcccagccccgcatcccccgtgcttctccatgtattatgtccctgcctccctgtttgctgctccactggaatgtttcagcatgcagctctccctccagtctgtagtgccagcacatgggcttccttcctcctcccgcaggcagaatcgcgggaagccataggttcagaagatcccagctttctctgctttgcgcgtttgtctctgttatcccagcacctgcccttggctaggtactccataagtacgtgataagtgatccttcttgtggatattacccaccaaagcatgtgtgatttgggaagtttataataaacctaagtgttttaagtgtcaaaaagaaaaaggcagcgtgcactaattggctccttggcttcgcagcccattccctaggaatcgggacagctgggccctcaccacgtcctttgtcactgcatgtctgaggctgccgtggagccttttcaggggaaaggtgtaaattggcataagtcatctccagaaacaccccagcagcaccctgtgccaggcccccgtgggctgctcatctacagcccctcatcattcctccagccccttcgagagaggctcagtcttccacccttcagaccattcattagagtggaagggattcagttgtcatttgttatttcctcttacccccgagacatccccctgcaatgtcatttcctacagtttggtttcctgtttggaaatgtcaggcttctatggcacttgaccatgtgggaaagcttgagctcttaaacccctgctcagtgtctgcttttgacaatgcaaccttgagtgcattgctgaaattctgagccttgatttttttctttttttttttcgaacagagttttgctctgtcgcccaggctggagtgcaagtagtgcgttctcggctcactgcaacctctgcctcttgggttcaagcaattctcctgcctcagcctcccgagtagctgggattacaggcgcccactactacgcccagctaatttttgtatttttagtagagacggggtttcaccatgctggccaggctggtctcaaacccctgacctcgtgatccgcccgccttggcctcccaaagtggtggaattacaggcgtgagccaccgcacctggcaatttttttttttaaatccgtaaggtgggggatccctacctcatagccacccaggctgtatatgaaatagccaacaagaggcctcatgggtccatacacaacaacaaatactcatgggtctatacacaacaaatacttcctccccctcccaccatggggagcttcccaggtttttttgtttgtttgtttgtttgtttgttttaatcaaacatgtattgtgtgtcctatacaatgcctggcattccagagaaatacaaaggtgccacgcccttgctctgtatctgaaaatcagtcctcagccttcaggaatgcagcttctgagtggaagggggtggggacaggccctccaaggccagctgctgtaccaaagtcagaccatgacttgtgacctttccttcatttcccttattgcctctggtttaatgcaaaaggttcagtgaggtgatggcctagctctgcccccagcaggcctgaggggttcactgggaaggttgtagggggcagcaggagtagaggggaagggagctgcaagtgaatgagtgaggcaggaactgccacccctgcggggttagaggatttggagtgggggacctcaggcttctggaggaaagtacttaaagtgtccaaaagaagaaggcaagcagcatgcaccaagtggctccttggccctctggcccattcaccgggtgtctcagtatgttttctgcagctataacagaataccacagacttaatttataaaaaaaagaaatttcttacagttctagaggctgggaagtccaatatcaggtgccagcatttggcgacggccttcttgccacatcatcccatggtagaatgcgaaagggcaagacagagcaagagggaacagaactcactcttataacaaagtcactctcaccatcattgagccacacctgcaataacaacattactccattcatgagacccaatcccgtcttgttaggccctacctctcagcactgtcacactggggattaagtttccaacacatgaactatgggggacacgttcaaaccatagcaccaggtatctgggccactgagccctcgctacatccctgccctatgtagtcagctttacctagcaggagggggaaagtggtatgtttgaagcccactttctgaaaagagaagacacaaggaaagcttgtgatgtttgaaagagtaaaatgaattctgcagaaagcttacccttcgtctgtgaagccagggaaatgaaatgttagtgttcaacaacacgtgtgcattgattactactactgatgcagcagagatctgggagaggtggcagggaggggatgtcaccctgtgtcttagtcctcaaagaaggcttcgcagaggtggtgtggaaagaggccgtcagctctggcccagtggccgtgggcatgcgcctttcctcctctgagctcagtgtcccttttatgatgggcccaccagcacctgccgtccagcaggaggtgatcccagcacgtgcctggcacttagtagatgctccaataatgattgtgttatattatcccaggtaagatgtgaaggggacaaggaaggaaggggaaacattggtcctagggtgggaatcacagaggccctggagcaagacaggcctgggctcatgtcttggctctgccacccaccagctgagcgaccttggatccatttttctgcttctctgagactgtgttccctcatcagcaaagtgggaagcagctcctcaaaagcccttaggtcacagcttgcagcggaatcagctctcgttaaacggaagctgccatcgccatagctgttatcatcactggaaggacagagaggaggaagcaggtggcagacgggcttgcacccacagggataaagcatacctggcctcctgctgagaatccctgtccctgctgaggtggagagagaatgcgaagaggagcaagcttttcacagcaaggatgcaacttctcaagagtctgagctgctgcttcaattaaaggaaaaatctgcaatttagaaaaccaaaaggcatattgctcccttatctggctgcctctgtgctttacttcaatctaaatccaggatttagatcactcatttacatttactaaatgcggttgaaggcgaggggcctgtgcaacctcccccggccccttcctccttccaagtaaggaatctgctttgaggtttcctgtaatgtctcttctagatgaagcccatgaacgtggaatatctcatgatggacgcctccatcctgctgcccccaacaggcacgccactgacgggcattgacttcgtgaagcggctgccgtgtggcgatgtggagaagacccggcgggtgagtgagcacaggacctgtcatctcctgggccactgttctccagaaccactcccagaccagggaggaaagggcttctttgtcaaagtcaagagcctgccctcaacacagcttagacagtggatagagagtacccatttgcccccaggcatgactttccaaggcatgtttttaccctttgggaagtagggtttggcattccgttgcatctggcacccagtgttggctgcagagaggtagccttcaccagtgcagacagacaagccctgagctcaggagtgtaaggcaatggggccagttttctgtgaaccatcgggggtgagcacggtacatccagtgcaggtgaggttggtgtgaaatcgtagcccagcggtctcaggacccccagagatagtgcgatgttaaggcatctacctgctcttgggacacagtcaaattaaatgtgaatctcaccagcctgcaggacagatatgtgtgaaaagattagttctcagaaccagctgcagtgtgtgcttccgttatcagccctttttttccgaagcaggtactctaggaagcagtgtcctcaggggtgttcatggtattttatctcccgggtaagatcagagtttctttcttagaaagcaccatcaccttttcctagaaaatcattcactggagacatgagtatttgtgtatagttcagaggaattcattgcacacagctccccttgtcagcctttatcatctgagttaattcgtgtgtgacagaggtgtttcacttttggattttgcaaaacaggaatgacctgtcatttgcacctcagacacgaggagtctgaaccttcctccctgcagctggtggttctacctcggaagcctgggggtgcagaggaagtgggacccatgtgtcttgagtcaatccacatttccaactgtctgaccaaacccacaagcctcaccgcaggacccaccctgtccggcccactgacgccttccttccatgtcctccctgccaggcacacgattctgtttgtgggtggcagtgtttgcactggacgtcctggcatcagctttcactggaggactggttctgacagatgtgtatgtgttgcttcatgatgctgacgtgctcacccccagccagggctacagcatcctgtgccaagaaggccccacctgggagatccccccgcacccctgagccagaaggtccagaggactgaacgctgagcactgctgctctggattccactttgcctttttgttgttgttgttgttgttgttgttttggaggctgcagtgagctgtgatccatcctggagtgcagtgttgcgatcatagctcactgcagcctcaaactcctgggctccagccatcctcccacctcagcgtcggtagctggaactacaggcacaagctaccacacctagctaatttttagatgttttatagagatgaagtcttgctaagttacccaagttagccttgaactcctggcctcaagccatcctcctgccttggcctcccaaagtgctgaaattacagacatgtaccaccacacccagcccacactctaccttcttttggttcacagttcatcagggtttttcttaccacttctatgaacacatagcctctgttatgaagtagatcaattcaaatcagttctttatgtgaatttcctcattaaattctataaccatcctaggagattggcactattattatccccattttacagaggaagaattttttttttttttagacagggtcctgctctgtcacccaggttggagtgcagtggtgccatcttggctcactgcaacacactctgccccctggggtcaagcaatcctcccacctcagcctcctgggtagctgggattacaggtgtgtgccaccacactcggctaatttttgtattttttgtagaaatggggttttgccatgttacccaggctggtcttgaactcctggacccaagcgatccgcccacctcggcctctcaaagtgctaggattacagatgtgaaccaccacgccctgtccacaggggaagaaattgatgcatggagaggtctggtgatttgctcaaggtcacccagctagtgagtagctgagccacaagtcagcccaggcaatgtggcccccagaacctagactcttaggcattctgatccactgcttcccacactgccttcttgagatctgctggctctgctcaggacactgggacagcaaaaacacagccccagtcctgaagaaatcagagccttagaggtcaaagtgggaagagacagtggcaggtcatgtggctcaggccattattcaagcagcattaggtcaggtcactaatcccacctggagcaggaagtgggacaggcatcagatagggaggcataggcccagagacaggtggcacattctggcaccaacacggcagtgattgcagctggagcccacaggaggatgtgatgaggctgggggtgctggcaggagccagatcacgggagccttggagccccttgagaaccttggctgtcacctcttaacacagtttcatgacctcatgccctgctgggctggggcagatggtcctgatccacaggcgagagatgggagaaatgcaggggccagtttgtcaggcatgtggcagaagggaggttgcttcttgtctactctgagctgctgtctccatctgtcaagtaaaatgtgcctgcctttccagagttatcgtgaggactcggcagcaagccaatggcaggtctcgatgatagtctttttgcccctcacatgtcacagagttgcaggttcccagggctgtgctgcccacctcccttgtcctggataggatgcacaacccgagtggctggctgaagcacagatagagaatatctcagcttctctagagtctctttgcctgtctgacaagtttccaaaagcaactctcaagtcctcccagggtccctgggtagcagaatgatataaaagaggccaggctacctcaaagccaaggcatccactttagaaaagcttcctttgtgactttaataatttctttctgaagggtggctttggccactcatctcactacggttcctgttgcaaggtagccatctagaatcatccagaagcttagctcttcaagcccacttcagaaatcagaacacaccaatgtgctttgaatctgagctaaaggaagttacatggtttagcaagcaattgagggcttatgtggttcgtttcaagttttttgcttgtatccaaagaacattccaagctacccctttggattcaaaggttttctttctttttttttttttttttccaccaagtagactttttaaaggaggctgatcctttttagaaactccatcctttattttccttaaggacttgtcaaagaggttcaaacaattctcctggcaaatcattcctaaatattcatagattcatcaaagagctgctagattcttgctatgtgccaaatactgtgttagccttgggggtgaagaaatgagtgagcacacatccctgccttctggaccgctctttttacctagtgaggtaaagtttattaacaagtaagagaatagcaggttgggtatcaactcacagtcagagctctggaggaaagaaacagcatgccatagccaggggctgaggagcgctcctcctgcagatagagtgatcggaagagcttctctgcagagttgacatctgagctgaaacctggagcatgaggaggagccaggaaggttaaagtgataaaggaggcactttccaaacagggaacagcacacatccagtccctgagatgccaccaagtgtggcatgttcaaggagcatagttaagtgagggaggggcaggagcgcagctacaggagaggatggtggtagcgctttgcaggccgtggggaggcatctcacgataacgccgttttccctcttgctttttttttttttttttttttttttttttttttttttgagacgagtctcagtctgtcacccatgctggagtgcagtggcatgatctcggctcactgcaacctgctcctcctaggttcaagtgattctcctgcctcagcctctacagtagcatgagccaccacgtccagctgattttttaattttttttgtatttttagtagagactgggtttccccagtctgttggccaggctgctcccaaactcctgaactcaggtgatccacctgcctcggcctcccatggtgctgggattacaggcgtgagccaccatgcccagccctctcttgcattttaaaaaccacatcacttattctttctttcaacatagttgttgaacatattctaggtgtcaggctctgagtaagatgcaagacaagaatgatgagcaaataatataaaataagaccaaaacagcaaggggtccactgagccatgccagctgagaagggaaattcatgttgaaatgaaggtcactggagctgttggggtccagtgagaacattggagcagaactttgggcttaggctggatccatcccacatgtagggggacctgagagaagcagtgaagaaggaaaacagtggtgtcagtcagaccaaccacgggtcaaatcccaactccagctgcatgaccttgagcgagccactcaccctcccggaacctcaggtccctcgtgggtcttgcctctcagctgttgcccagagtagacgagtgtggctgtgaagtgacaagcccagggcctggcagacagtaagtgctcaggaagcattgtctgaacagagatggagcagtctagtatgtaaggtgggaaagaaatagggtctttcatgatctaaatctaccaaagcttaatgccagagaaaagagagttaggaataggattttttggtgaatatcaaaatccaagtttaagccactagccatctgtatatagtcatcttggaagcggttatgaaacacccatatttgcacgaggttttatttgtccccacattgtttccctgttcctttgtaaaaccacaagcagtttttgtgtttatcactattggccttgaggaaatagaatattttgctttattttttcgatgtgtattatacattaaagaaaatacaataacatctcatgcagtttcaaaagtaaagggaacagtctttcccatgatttcatcaccctaaacaaacaatacttagacatcttttgtgctcctcctatctttgtctgtaaaaagagtgtactgtggtcttgctttcatcccttctttttctttcttttcgtcgtagcacaagaagtttttcatgttgtcacagtttaaataagtctcatttcttatggcctcataaaggttcatctggcattttcttgcaagtagacattttcgttgcttccagtattacattattttcaactaaactataatgagcagcttcatgaatacagtgtttttctttcttttgaattatttctttaggataagttcccagaagcggaatttctggttcaaagggtatgaatgtgtttttttcatgaccctctgcatattgccaaattgctttcccgatgggttgtgcccacattaaactgcttcggccctcttttaagaatgactgactttcacagctacatggcctcagtgggcttctaacttgagtgactgtcgcctaaactaggcagcttgcacatgcagcaaggaagcaggagggtgaaaaccgagcctttgttccaggccagctcgtgggctcagcacatcaccggtgccatcccgttgtacctgcacggtgggtgccccatttccagaacacaagcctgggcttgggcacgtcacgtgattaccaagccccagcttgagccacagtgtgtctgactacagagccacccaccttcccctgctcattggactgattccccggtgacattgagtttgccagaatttgcttccagactcattgaagcaaagaaactggagcaatctctttatatttgagcttggtcagctgtcatccttttcaaaatctaacctgttcttcctgggtcagtccttcctgatattctatggaagaatctgaaagaataataatttatttttcctttttaataatacttttaaatttgcgtctttatttagcaaagaaaagcgctcaataaaaccctgggtcccaagccttaaatcttttggaggtcaaggagtgtggttggaagaacacagagcttggaatctagttattcactaactgaccttgggcaggctgcctgtcattgctcagctttggtttccccatctgtaaaataggaaccatgcagagtcattaaaagcttagatgagacaaccccgtacagctggcatagtatgcggcaggccatggggaatcaagagagtgcttattgttttgggtgtggtggggtgaattttatggctcttatgctcatattttagctttcttttgtgaatttacagagttgtggggctgcccaatgtgcctaccaggcccttataacccccctacccccatgggagcccaggttttgcctcgagtggagctccccgccctgtgggaatcggcccgcctcagattcatggacatggcttctcatgtgtccttccttctcttaggagttggggcaggaaccaggaaaaacattgagagattttattatacagtcatccctcggtatccatggggaattggttctagggctcccccaaggataccaaaatccacagatgctcaagtcccttatataaacggcgtagtgtttgcatataacctatgcacatcctcctgtagactttaaatcgtctctagattacttatgatactgagtacaatgtaaatgctatgtaaatagtttgttatactgtattgattagggaataataaggaaaaaagtctgtacaagttgagtacagatgcaaccctttttttttttaatatttttgatctacagttggttgaatccacagatatggaacccatggatacagagagctgactgtatgtgtattatattctattttatatttatgatgatgattgttattatccatgtgttgtttgcaaggcaaaagcagatattggcctatattgggagccaaattctgaacttttaaagtatttattgaaaggttacagtttttcagagtggtgggctgcagaaagccacacgtttctgttttcttacccacctgctctggtcctgcatgagttatttgccttcaaaaccccaagaggaacaggcgtttgggcacagaaatgagcgtctccttgacttggacctggctgtgatgggccgtttcctttctttctcatcctcatggtcatgactccttatttgagagctcaagctgccaaatatttcaagtgaccacccacgtcttgggctttctgtacttggactgccatggatgtttaagtttcctggtgcacttggttaagtgacacacatgtcatacattcctgagttcacacccagctcagccacttagcaggtgtgtgagctgaaataactctgcccctctcagctctgtttcttcctccataaaatcttcaagttacaataaggtgcccacagttcctgccaccccgtaagtgcttaaaaaatagaagttcttttgaattttttaatggaactacacttctttttctcccaattgttagagatgtctttatgaagactgtacttttaaaaactgttgacaatcagatacgaatgctaccaccaccatcatcatcattataacttaagagctgatctttctccagtgctttctggtttacagaggactgcactaccttagcatagggccaggagataggattgctcttccagttccaacattaggaagttgctccaaggtctcccactggttagggcgcaaggcagcactgggtgtaagcaggctgaccagctcctcattgcctggggtatgaggaggcagtgtgagtgcacctctttgcagacagtaatttggcccctttctagttttgggaggcacactgctgtatagagggcacctcccctcacctaggtccagactgcagccttcagagccataaacaagaagacccaaaggcgcactgggattcgcctttgcagctccctagtggtgacagtggtttgtccccccaaccccactgtgctggctgctttccctcctgcgttatctcagaacctcctagcaggcatgcgagctatcatgcccattttacagatgaggaaaaggaagctcacagaagtcaggggacttgcccagcctagtggaactgggaatctgatgtagacctcatgtgtctgactctggagctgtccccatggggcactgcaccctcagtcaggcccagcagctgtgcctcagggagagaggcctgcaggtggccttttctgtggactgcccctctgcttccttgctctggttggtgggcaagcctgtcctggggctggaggctgctttctgcacacacggctccgactgctgggactctgctttgtttctgctctctgaaagtacctggtggccacacaattctgaccagacaccacttctatgggccaggaatccctgtgctggtggatccacctgtgcccctggtctgctggcagggaaagcctgaggggcattcagggaaccaaggtcactgcccacctgctaggtgcgaggtctctgccccgtcagcagcacaccccctgtcgtaagaccaagggagcgggagttgaagagactcacccagggtaggattttcctcaggtctcaggccctgcagcccacaggcatttcatttcaccctcttctgtctgccccacccccgtattcagtaggtagtaccttgaaatgcttttggagtgattgggttttccagagcccatgctggtttggttgggacagacagactcagggtctagcccttgctggaagcatggcctgggcaggtcacttcaccttcttaggtctcagctgcccggtctgtgaaatggggctgactgctgggcagggattattatgaaggtcacctgatacttggggacaaggtcctggcagatgacgggtgctcagttcaggtaaagtaacccaaacctgaacctgtgaataactgaaaacaggctactccccctttgatttttttttttctgtcttgttataaaagcacgtaccagaatcaaaacacccgaagaggtgggctttattgcgtttctttcttttttaatagagagtcatggtgtcatttctgggtgtggggcatctcactgaaatgactctgcaatctcactcttctctgctctctgaactgttggtccaggccatccgggtgttcttcatgctgcgttccctgtcactgcaattgcgaggggagcctgagacacagttgccgctgactcgggaggaggacctgatcaagactgatgatgtcctggatctgagtgagttggctgctctgagtcacagcagggggctgggggacatgggacatgggacaccactctgctgattcacacgccactgggagggtcagtgtgcaacctacattttgtactattattgagctgtgaccttgagccagcggtgtgcatgtcccatgcaggttttgaagaaaaggcccctgggttctctgagatcagtttgagggttctgctttcacacagctggttctctaaaaagtctctgcagagcacctggaggctcaagcaagggtgaacaaactccagggttcctgtcctccctataaacatagtggcatcggtttggttggttttatatattaagcattttctatatgattctaatgataaaagggttctgctgctaaagaaagaaacttgtaaaaagcaaaacaccagtgtttaggtaaggatgaaggctttggaggctggagaaccacgtgctcagcccataaccttgagctacttgttccgctgtgtagtgcctcattgttctcatctgcagcatgaggctcagctttagagaagacaatgggcataaagcctgaccgtgttcctggaacccctctcgtatttgtatagctttctctttcctccatttgctacagggcacaggcacactaatgagcagcatggttttctgtttcttaacggcattgtggtatattaggagtctttggttataagagacagaaaactcaccttagaccagcttaaggaaaagaaagggaaattggctgatgtcactgggaagtccaggagtaggctaccttcaggcatggctggatccgggtgctcagacactgtcatcaggaagctgccttcctccgtctcccaactctgctttcctctgttcatcctcaggagggctctcaccaggtagtggcaagatggccttcagcagccccaagatttgttgagccagctacacagccctgatggaaagagaagcttctctttccctttaattctctaaagtctggggtagacgtgttattggcctagcttggggcacatgaccatccctgaaccagccagtggtcagaggaatgtgactcactgattgtctaagctggggtcgcatgcccagccttggagctgggagggagggagggccagttccttttgaaccccatcacctgagagagggaagaggcgaccctcaaaggaaagccaccaaagaagggatggtggctgggtgggcagaaacagcacagggccactctctgtagcactgttgttgctgttttaaatcagctttattaagatataatttatatacaaaaaaactccccaagggttagtgtataattcaatgagttttgacaaaactatagagttgtgatctagaccctgctttgtattcccttgaacaaatgacaggacccccacagcctccgtttcgtctcctgtaaaacgagatggtctttcttaaaatacagaattgttttcaggattgaatgaaatagaacatgaaatatcacgtgaccaagcatagtgcctaccgtgtaactgtactcagcaaactgtagtcagtattacaggaggtcatgcgtgtgaagagcatagcatgccgcctgacacgtagaggttctcagtgaatgagtattgtgtgttacctggttgtctggtttctttttctggccttatttatgttttatctttccctttcttggaagaataaagcagctgtgacgcctctctgcctgctgcccaactcctttggcccttttgcccttgagaaatggccacaggaatttctctaagggtttaaattgatcaagttggctgcaaagaatcataaaccagtctttctctgatttgattcaaggagagaaagagcttgctttgggggggtgggggagggcagtggggagggggcacttcatcagggcagcaagaatgtttgcatccgtgaaatggaattaaattttatgctgggaattcacattccttctctcctccccctaggaatggcctgctggaataaaggttcaaagtttttcacttatcaattttaattgattagattgctagttgagatcacttaactgagcctttttgggtagttggccattaagaaagtaatggctgtttgtctttgcccagcctgattgcaaattatgtcttttgctaaggagggcgactttcagaaaatagtagggattatggaagcacgtggtactaggataagatatgcctgtattgttggtttatttggtttttttcttctttccttttttttttttttttttttttgagggagggattgtaaatgctggagcttctcctcaccttccattgtgggggaaaatcaccctactgtgcaatctgaccaaacgccttctgtatacaaaatacaggtgaaggacaggtgaagccattcttgcttgctgcatgactggaagctgggcatgtttttgtctccctgatgaacttgagaaagctgactccgggagaaatgttagggactgctcaccatttacctgactccatgtggtctgctaggcttaaaggagtgctgtctccaaacagcaggaagaggtggcgtaaagtgtattcactgccccttgtcacacttcagtaagaaacaacagcgtaaaggatattccccagaagccaccccaagtgcttgctgaccagcagcaggtctctcggctgggtgtgacagccgagctccggctgtcataaaaggtggcttctcatggggagcattaaagatgtggtcaccactcagcaaagaggcaaactggtcatgcttaaagtgaagcctgttttgtttttcactagagaggagagtggcagagggcagaggtcaggaactggcagccacgtgtgccacatctgctggagtgatggggggctggggtgggaaggaagagagagaggaagggagggagggaagtggaaggaagttgaagggaaggagggattggaggaagaaaggggaagggagggaagggaagaggggaggaactagataaaacagtggatttctagagaaaatagcatcatgaatctccatatacccagccctcagcttcaacagtttttaccatttagctaagttttattttatctgccctttcatctgtctatttaaaatacgccacccacccacacagtgtattaaagcaaatggaagacatcatattattacatctagaaatacctctctctaacagagaaggactttgtattgttccttttaatggaattgattgccaccatttgcaaaccgagtgcctccccagccccagctgctgctttggaatggaggccagggtgcaggggcctgtagacagggcctgtgctcacccatgtgctgccgcccgggtcttgttgacatttgattttgcagccactggcatcattggagtaatcatctttgtaatcttccccagagtcttcatgcctgtgaggctcagtagccttacctttgaaatggttctagggctggatgtggtgactcacacctgtaatctcagcactttgggagtctgaagtgggaagatcacttgagctcaggagttcaagaccagcctgagcaacgtagtgagaccttgtctctactaaaatccaaaaaaatagccggttgtggtggcagatacctgtagtcccagatacttgaggggctgaggtgggaggatctcttgaacccgggaagttgaggctgcagtgaaccctgatcatgccactgcactccagcctgggggacagagtgagaccctctttcaaaaaaataaaaacaaaaccaaaacagggttctaaaagactttccaaggagctcaaatgagatcacatgtaaagctcacagcaccatgcttggcacttagtaggtgcccagtgagtgggagttggctgcttccctgctgcagctgctgaatacgcaagctgaaactcatcctgctgggctccatggggctggcattttctgcttaagcaacactctgagaacagtgtcctgagacattcaggtcattgctcagatgatggcactgttttgaggggtaagaaagatatagctctggctgctttggccagaggaagggagctgtatcccgtctaggctgtgagactcactcactccagtgtgcctcctgaacagggacaagcaggctttgaggagaaaccacagattccttgggattgacctcagagcctccttaaaggattcttgcctgtttccaaatatcatgagcaaccacaataggggagaaatctgtccattatccatacaccccaaagagacacctggcaaccaggtgtgttcagtgtccagtttccttgcagcctgttcatgtgggcacctaacattcacatagttgcagccatagcatgtgctacatgtatctaacttgtattctgatttctaaaatcaattcgtgaagcccattcaatgaagacccattcatgcattcagctatttattgagcacctgctgtatgccaggcacagtgctaggagctgagatgtgagagtgagcaaaagccagacttcacttctgttcttgaggtgtttccagttgtggagggagcaaccactaacaggtaggttaagtaaatgcatgatcacagactgattgggatggctccatagaggtgatgagcagggtccatgctggagaataaccaggaggaaaatcctcatgggctggttagggaaggcctctctgaagaggtgctgtgccaggagggaccagaagcttctacgagaaagcacagaaatgaggactgccttttaaggatggcagaggtgaggctgaggtgggagagagggtgctgtgtcccagggtcctcacagaaacttgggtggctggcacacaagtagcaagagtgggtcagtggctgggaagagccagatctcaactacagggctttctcacagggacatctgtcccaaacggacacttctagagctggcactgcctggtcagacggtcccagaaggggccttcgagctgcactgggggctagaaaggcctgcagcagggcggcgaggagcatggactcaggggccagactgtgcctggatggaagtcccagctttgctgccttctgcttgccagctgtattaccttaagggaactgagtctcccggcacttcagtttccacagctgtgaaataggacttgctgggaggagtagatgagcattatctgtgctgtgcctagaacagtgcctgacagaattgcagagaggccatttaggaggctgtggcagggaccaggggtcagtgctagtgggcaaagagggacgggacagtctgggtacagcattttgtgacagtttgcagtggcgatgccagagagctcggttaactctggggttctgagcttggggcagtccagggggcaggggctgggaggatggtgattctgtcatcagcagggctgatcctggaggaggagctggttccaagcagaaggtgctgaagttggtcgggcggccaggtgagacgtgccatgagggagctcagccaggatgtccggtgggcgggggagcagtccggaagcctcctcgctacttcatagattcagaactcttgtgtttagtagcctgcatgatattctgttgtctgagacttctgacgtaaccatggtgcaattttgggtcatttttactcttgcctggcataacctagctggctgttcctcaaaagatcctcgcgacagtgtgttagatcatgtggtgtgtaagggaagtcctgaaacctgcagagaaacgtctgtgaataagcagacctctgtacactgggtgtgagtgctctcccaggcttgaacatacttcccagggtctgggggcctggaaaatactcatcaagtacagaacagtaggtcccagcccttaggatttcatagcccagaaaagcatcaaaacaaaaataaaaaacaaagcttttggggacggatcgccaacttttgtttgtttaccgagtagtcatttttaaaaaaagcatttatgaacaatcattccataaaagaaaagacattgttaatattgagtaggtagcacatcatttcagaacgagggtagtctttccaagaaacagtagtggcaactgtatacacacatactgtgctttaatggggagtgggtttgttgttgttgtgggggttttttttttggttttttttttgtttgtttttgtttttttttttttttttttttaaaaaaagcaagtgcagaccaattactctagcaaaagccagtgactctgtctttccaagcttatggggaaggcaaactccaatcacagcagcacagatcaaactcagatggccaccgtgtttcctgttctaagagcaggtgacggggttaacctggctggaggtcagggaggcttctgaaggaggggcccatttgagggctgcagggggggtgtgggtgccgagaagtggcgcagaagaagcaaaggccctggggccgatggggatttggggaagatgagagacggcagtgtggccacagagtcggggagtgggagggtgaaggtggttggcaagatgaggctgggtaggaagccatgcaggccctgtgggcatatcaagtgttcagggttctatcttaaaaacagtgagaaaagtttttacctagctgatgtgatcagatttgtatctcaaaaggccctctctggcctcagtggaagagatttatgggtcagggcagcattacagcagggagccccatggggaggccaggcctacaaggcatgaactaagaggtggtgtccacaagctggcatccacaccaggctcggacagtctggtttgccccagagacttgtcttgaatgctgctctgtccactctgtggcctaggtacaggggcttttattgcacagaggtccatccagttggatccggcgtgttctccaaaccgtcgtacctttgaagctaattattaacaacaacccaactatttgggttgtattcacctcctggcaaggcaggctgctgtggaccttccctttgctctccttctggctgtttccaggccaggacttgcctgtttaaaagtcaggctgcggttatggaggaagccttggatcctagacaaatgcagaccgaatctcagccatgcttcttcctagccatgtgactttggacaaatctattcccctctctgtgctttagttccctcattgatcaaatgagaacagcgatgcccaactttgcagggttattgtaaggcagaacaataaggtggatatagaggttgcaaacagctggtcctcaggcaggtgggcccacaaatgtagcttcatggctagtaaagcatttgcaagcgaattttatgttgctaatgttttaaaatcaggatattttatcgtaaaaacctagctatcaccttgaatatgagacagtgacagtctgtccacgcagagcctgcatccccacaggcagcagtcagttgctcctcttcatgggagtgaacccttctcccagctgctagagtctctgctgaactccagacctgtgtactcagctacctgcccaacatttcttggttaccacaaacacaagatgtgagctttcccacaaaacctgtctccctgcaggcttccagacagttgatggcagttccatgctggtggcaaaaaccacaggctcatccctgactcccctctttctctcaagctcaacttccagttggtcagcagacctattcagcctctgccgcaaaatacagtcagccctatgtgtcctcaggttctgcatctgaagattcaaccaaccacagattgaaaacatttctatttttatttaatttttaaaatttatttattttttgagacagagtctcgctctttcatctaggctggagtgcagaggcacaatctcggctcgctgcaagctccacctcccagattcaagcaattctcatgtgtcagcctcccgagtagctgggattacaggtgcatgccatcacgcctggctaattttcttttttttttttttttttgtatttttagtagacatggggttacaccatgttggccatgctggtctcaaactcctggcctcaaatagtccgcctgccttggtatcccaaagtgctgggattacaggcatgagccattgtgcctggccatttatttattttgagacagggtttcactctgttgcccaggatgaagtacagtggtataatcacggctcagtgcagccccaacttcccaggctagggtgattctcccacctcagcttcccaaataactgggactacaggcatgcaccaccacacccggctgagattttgtatattttgtagagacagggtttcactatgttgcccaggctggtctcaaactcctctgctcaagcaatccacccaccttggcctcccaaagtattgggattataggcatgagtcactgtgtctggcctattattattactatttttttttttatacaaggtctcgctctgtcgtccaagctggaatacaatggtgcaatcatagctcattgccgcctccaactcccaggctcaagcaatcctactgctgcctcagcctcctgagtaactgagatcacagtttcgtgccaccatgtccagctgattttttttttaatcttttgtagagacagggtctcactatgttgcccaggctggtctcaagttcctgagcttaagcgatcctcccgcctcagcttcccaaagtgccaggattataggcatgagccaccatacccagactgaaaatatttttaaaaaacaacaacaaaaaaatacaaccatgcaaaatgagcagattttaaaaacagtacagcataacaactatttacatagccatctcattgtatgagttattataagtaatctagagatggtttaaagtgtgtggtaggatgtgcataggttatatgcaaatacgacaccattttatatgaaggacttgagcatctgtggattctggtgtcctctgaggggttctggaaccagtccccatggatatggagggacgactgtattgtcaggatgttaccttctctcccagcttctcccagcaccttgtttgaactgccaccattttttttttttttgagacggagtctcaccctattgcccaggctggagtgcagtggcgcaatctccactcactgcaagctccgcctcccgggttcacaccattctcctgcctcagcctcccgagtagctgggactacaggcgcgtgccaccacgcccagctaatttttttgtatttttagtagagacagggtttcactgtgtagccaggatggtcacgatctcctgacctcgtgatccgcccgcctcggcctcccaaagtgttgagattacaggcgtgagccactgcacccggcctttttttttttttttaagctagagatgggatctcactatgttgcccaggctggtctcaaactcctgtgctcaagcattcctcttatcttggcctcccaaggtgctgggattacattcatgagccattgcacccagctgtgccattatcttttacctgaattattgcagtagtctcttgcccagtcacttgcttctgttttgtcccctagagtttattctcagcagcatgaactgtcttccttttaaacgagaagccagatcatgttcttcatttgttcaaagtgggctcccatgccagtctgaataaaaaacagagacctttacccctgaggcttattatgtgacaccacctccctgtctctgcctccttgctcttcttcaaacacacctggcatgtacccacctcagagtctttgctctgactgtgccttcttaccaaccccaacctgcaaaccatttgttccctagcacaagtacactggagggcaccacgaggcccatgaaagctcacacacgaaaaccgtaccccaaattcttgctccatgtttgaaatcctgaccacatcgccctgtttgtttattcttcatttgcggattaatgtgaatatcataaagattctgcaggatccaacttcctagcattctgcgtgcttcgccccagcttctttgcagacaagagcttttaggcagagtggaagtccctggctattttcatcggattgcctggagattcgtttccagcaaaagtattatgaagctccccaagcaagtatgtggtttgactgtcagtccgtgaaaatgtgagctcattgatttctttctcttgtaaaaccagtactagttttgtggtcctgtcagttctggaaaattctctgtgttggcttattttgctgatgacccaggcattgtcatgtgcctctcatcctagtgaaaatgagtggcataaatgagaaagacaatgaaaaacaaatccagaatacggaacattctagaagacagccgacctgagtttttcaagaatgtaaatgttgtggaagaccaaaaaagagggggacgaaggtagaggggtactgtttctagataattgaaacaaagtgacatgacagttgtcagcctggattgatcttagattgagggggaaaagtagccttaaaggacatttttctgcaaactgaagacatttgcatatggattgtgattgagtaatataattgaggtcaatattacgtttcttttttttttttttttttaagagatgggatcttgctgtgttacccaggctggagtgcagtattgcaacctgaaactcctgggctgaagtgatcatcccaccttagcctcttgactagctgggactacagatgtgcaccaccacacctggctgattttttttttttttttttttttttttaagatgaggtttcgctgtgttgcccaggctggtcttgaacccctgggctcaagcagtcctacttcagcctcctaagtagctgggactacaggcagaacccctggcctggctaatattatctttcttgagtgtgataatgccattgtggttctgtgggagtatgttcttgttcttaggaagtatgggctgaagtgtgtaggggtaaagtgtctgatgcctataatgttggactgattcagaagataaaactgtgtgtgtgtgcgggtataatgagagagcagacaaatgcagcccactgtcaacaagtgatgaatcaaggtgaagggtacatgtttgtctgttacactgttgtttctttttgagacgggatctcgttctgtcccccaggctagagtgcagtggcacagtcttggctcactgcagcctcgaactcctggcctcaagcgatcctcccacctcagcctgtagtatctgggactactggcacgtgccaccatgcctgcctatttttttattttttgtggagatggggtctctctatgttgcccaggctggtctccaactcctggcctcaagtgatcctcctgcttcggcttcccaatgtactgggattacaggtgtgagctaccacagctggcctattctattctttaaacttttatgagaatttgaaaatcttcaaaataaaaaggaagggacgagagagagagagataatccagtccttgaaaatccaacatttaatagatggggagtataatgtttaggaactggagccccagatttagaaaagcctgggttttaactcctgctgtgtgaccttggacaaattagttaacctctctgagcctttcttcctcatctgtaaagtgggtctaatagtgcctacctcaggactgttctgttgattaaaagagaaaagtccatcagaaatactcagcatcacactaagtgtacacaagtgtttgtgatagaaacagtcattacaattcttcctcttgactgcatattgggcactgaaatatgtctgttctctttggagggttctttgtaggaatcctaacaaagcacagcctcgtgactgcttctgtccaggggacacattgaaaagcagaggaggtaacacaggcttgttaactagataataaggttcttggaaagatgactttcaggaaagtgggtgccgtctgattgaagagctgaaaccacaggatggggtgggaacttgaatcagacccagatggctccttgggggcaatttagttcaagcatccaggcatgggccctggagaagcggtttgcttagtgctgactctgaagtggactaatgttaacatgaaacccaagaggcaagtatgtacatggcattcaaagagttggattgcaaggcgagtgtggttttgtggcactttggcctgttctctgcccccacccccggggtcccgtgtttttgtctttaaaggaagcacagtcctcagtcctcatggggtcgctccacaggtagacatttaatggagcagctgctcatcacccgacctgctgacttggaatcactcccaaccctcctccaacctcacgatcgggggatcatcagctccctggactccacagctctgccccatccctggtctggcctctccacacctctcccctgcccagtatctcccccattctaccccagcccatggccttgcgccacgctgcttcatccatcctgatgcccagtatgtaaaaggcgcctaacccgccatcatgtccctgcttgtaaactctcagatcctcgcagtgcagcggcccaagctacccacgacactcctcttctgccatatgtcttgctgcatctgcccacacagtgcccaggctgctcacaggctcctggacacagcctgcctgcccttgtcgcccctgcctggatggccctcccagcctccttcctcctgctccacgtgccttgtgcacatttcagacgtgcgcttaccgctctgtatatccctagggcctggcacagggcctggcacatagtagacactcaaggcttcttggattgaactgattaaagctttagcagtcactgtaattattcataaacactgaaggactttcattaacatagaaatagcatttccaaatctcatcttgagtaatttcaggcagttggattgtgagttagaaaaatgatgtttgttcatcattaacatacatttgaatagtcaggttcccactgcagacttttgtccccctctaatgacatataccaagtatcttaaacccatcttggcattttctaaaaatgtagattgttttgatttcaacgtttgagctaccccaaattatttaacctctctaagggctaaaatgcttcctcttttcttctcttttttttcttttttctttttccttaccccactttgaggcaggcaccctgaacttgacagattgggaaaaaaatcaagtttcagttaaaccaccaattctctaaggaaatggaaaacatggaattcacaatgtttcccctctctatgaattaaacttcttccctgtgtacttgatgaataatgttgctggccacttttcagaaatgaagtagaaatatggagaaatgaaatttgtatcctataaactgactggaaatgggattgtaatagagctgtcagttttgttcaagtggaaaatttttaagtaaatccaattgcagtattatttggttcttttaaaggagagggtgatgtagctgtttcctgtgtattgattatttgattggtacctgtctgctggacctatttttttttcctcagtggcattcattgatgtggtttaatgtatattcctgtaatctttccctgttttataaacttacaatcataattgagccacattagagagacatgttctgctgagatcacaaggtcacctaatgactgtgccctcttttgttgttgatgtattgaagtggctctaggacagttcttctgaaaaacacacacacacaaattattcttttttcctttacaaagcaggatttctagattcaattctatgcattagagaaatgaggcatttgagtagtggagactgtttgagctttttttgcctattaaaattattgtttttaagccaggcacagtggatcatgcctataatcccagcactttgggaggctgaggtgggaggattgcttgagcccaggagttggagaccagcctgggcagcatagtgagaccctgtctctacaaaaatttttttaaaaattagcagtgagtaatgattgcaccactgcactccggcctgggcaatcgagcaagaccctatctcaagaaaaaatatctatattgtttctgctgaaggcactctacagttgaaatactttttcaaaataccagtccttcccacacatttggaaatgggaccatggttttgatttctcacaaaggaagggacttagtggcttagatttgctcaaaaagcagtaacttccgaggcacatcaacccttgggatgtggacagcttctgggtgcagctgcaccagagggcttccagggaggggcaggggtcctgctggcggttgagtcccagcccagcactgtgaccttggatatgtctgtgtgtgtgtgtgtgtgtgtgtgtgtgtgtgtctgtgtgtgtgtgtgtatgtgtgtgtgtgtgtgtgtgtgttttgagacatggtgtcactttgttgctttggctggagtgcgtggcataatcatagctctctgcaaccttgaaccccgggggctcaagggctcctcccaccttagcctctagagtagctgggaccacaggcatgtgctaccatgtccagctaatttttaaatgttttatagagatggagtcttgctatgttgccctggctggtctcaaactcctgggctcaagcggtcctcttgcctcagcctcccaaagtgctgggattacaggtgtgagcccctgcgcctggccttggcatgttttttgaccagggggaggatgaggtgcttgggaggatgagatgtcaggaggatgagacgctgcctatcagtgtttagcactgtgcctggcgtcttgatagagcccagttgacgagggctggcaaagaagctggtttttgggtttctcatccaaaccccactactcctctgtcaagaaatgatcactctagttattcagccaaaccttggaatatccttgtttcttctcatccctgtgaccaagctcttagcaaatcctgccagcttaagcatcacatagatagagaacccagctccgtctcactgcctttagctcccctgcagctggtggggattctagaaaactgggactagggggtcagcttcctcctctgccctttccacaccaacagccagtagaatccttttaaatagacgtcagacccttcagtggtcctggcttcccattgtggtgtcagctcactgtgccatgtgtgccccccatctgctcctcactgtgctagcccagtcatacggagctcaagagatttcccccttgggccaccggcttcagggtgccccaaaacccccactctgccccacagggctgccaaagccagcctccttgacaacatctggctgacggggaggggagggcagtaagagccgccacagaaaacaggaattcatggggggagtggggttgaggattaacgttgagtttcaagacatccctcgctccagcccactctgtgagctgtctggggctccgcctacacacagctcctcaccctgaagctgctgggttcccctgcatcacacgcccaccttccccagtgaacccagccaccagatttgacacaggatccggtgattgctcaggcctcaggaggggagggttgccttctggccctgatatctgatcaaccacagaacacccaaaacaaatctctgaaccagtgacagacagcgcgacctttaaggaaggtgtaagtcaggagaaggccatctctcctatacatcacctctcccagcccaggaagctggcctgccaattgccccagagtctggcccagccactgaccaggtccaccctgccctcagccaatgcacactctccagcccaccccagggcctgctggggagatcaggaatcgaagaatggagcagcacttcctcccaccctcttgtaggagggagatgggttctattcagattaggcagaaacgctgaaaagtattgtgaccttgaatcctaaatccccgttaaagttgaggcttaggaagcacctgaaatcacaaggactgatcattagaatctatttaaaaacaaagagcagggccgggcacagtggcttaggcctgtaatcccaggactttgggaggctgaggcgggaggatcacttgagcctaggagttcaagaccagccgaggcaacatggagagaccttttctctactaaaaaggtcgggcgtggtggctcattcctgtaatcccagcactttgggaggctgaggcgagcggattgcctgaagtcaggagttggagaccaatctgattgacatggtgaaaccctgtctctcctaaaaatacaaaaaaattagccggatgtggtggcatgcgcctgtaatcccagttacaccggagactgaggcaggggaattgcttgaaccagggaggtggaggttacagtgagccaagattgtgccactgcactccagcctgggtgacagagtgagactctgtctcaaaaaaaaaaaaaaaaaagaaagaaaagaaaaaacattagccaggcgtagtggcgtgtgcctgtagtttcagctacttgggaggttgaggcgggaggatcacttgaaacctggggagattgaggctgtagtgagctgtgatcgagccactgcacttcagcctaggggacaacgtgagaccctgtcaaaaacaaaaagagcaaaatcctgatttaagacttaagaactctggtggagggtgtgaggggtctctgtattgctggtgaccagcacaatgcgtggtgctgcaggcggcctggacagatttttcaaatgaatgtcaaatgttgttcatacttctaaacttttaagaaatgtacagaatatggctaggcgcggtggctcatgccggtaatcccagcactttgggaggctgaggcaggcggatcacttgaggctaggagttatgactagcctggccaacatggtgaaactccatctctacaaaaaaaaacgtgtgtgtgtgtgtgtgtgtgtgtgtgtgtgtgtgtgtgtgtgtgtttagagaaatgtacagaatactgagcttgggacatgtaaaagcataaattttcatttttactttgacctgcctgaaaatagaagtgaaaatgtgtttgccacaggggaaccgctctaggggcatctgatttgctcctaggccaggccaggacagagctgtgaccaagcgtgagggtgggtggtgcgaaggcctgtggtttctggcccagcaggactttgaaaacaatctgtacccagacctcactccagaaggttctgagtcactggctccggggtggggccctgacatctatattttcaaatgctccctaaaggattccattgcatagccagtgttgagaaccatgggattagacagagtgaggaatgttctggaactcagcactcagtgtctgctttgctgctttccatgaattctagttccctctaggaactctccttgcccacctgctaatcagccagaggccatcaggaaggctggctttggtagcatggtacagcagtcacatctctctaagttccaaagtcagtttctcaggtggaaaccacctgccgtcccagtcaccctcacagatccctcatgggtgaatgacatttctcaatgaggagtgggtccggcacagccagtctgaactgcagggctgcagtagaccccgtcgttgagcaggttttagaggaagaggttggccatgtcagatgaaatcctggtttctttaccagggagaatcatgctgggcactttgaggggcgctcaagggataggcaggaagagccaagcccatgagggaggcagattcccatctgcccctaaggttccctcatgggtctggcagcccgagaggcctgtggtatttaagctgtttacgcttctctccctctcctctccactttcctgcatccgtgtagttgagtttgtggaagttaagcttgcatacagtgtgcctctacctgacttgaagacaaatcacttgccctctcgagccttgggcacctgtcttgagaggaagggcctgcgtaataggttgggcctcctggatgctccccagccctgcagccctgcagccccacacacagctacatgtgtgctcagaaggtagctgaacccattctgtgcttggccttgtgtataatcacttgcatgggctaggcaggagattcccttgcagaacttgaaactccctgcagcactgaaactccagccatccctatctcttgtggttgttctgaaccagtgccagtcttggaaatggcctgttttgtttcaggcagtcataaaaatgccttaggagtagagactgtccaggccagagtcagccagccagaccatggaggctcagaagttgttggggctgagctggcctcccccagtcctcacaactttttagtcatttgctaataattaagagccaaaagttctcatcccatcttccctccagcctttggactgactgggatgccaccattttttatacaaggttcaaggtgagatagactttctttccttttccttccaaattctcatgtagaaaagccgcatgcaacttcctggtttttcaacttggcacatccacattatctttttgcatttatcttttttttactacctataccctggcctttgaattttataatacactttgcatttttctaaatgcagttggggttttccagagctgtgcaaagccaggaaatatgcatgtcatttaaatgactccggttaacctttagcctttaactggtttctcataaaactcgactctctcccagctatggtttgcattcttcagagcagcaaaactgatgaacatctacagctttcactgttccctgctgggcccccttccctttgctgcctccagtctgatgagccatgctggcagactctgggaaatgtgagtcccaagcagtgtctagcagaaggttccagactagattgatgcagcccctgttgccacttcctgaggtctcccagggcccctggcttcagcggcttcccttcctatcatggcatcttgttcctatcatagcacagtaaccataatagatcccatctgtttcccaccagaaacacaagatccagactgcagattgcacacttgactgtagacagggactctgagtgtttcctcacccactcccgtgcgcgtccatccatcatttgctgaatggtaggcactgtgctagccaccagaaacacaaggacaggacagagccctcctcccttcaggcatctagcacagtgatgcacttcagcaggtgggtgcaggtgctctgctggaaactgcaggatcaagaagaatacagagtagttgggcccttgctgggggtgggtgggtaaacagggacaagaattgcttctgggcgtccgagcctttgagccaagggttgttctgagccagtgtgaagcagcagacaacctggggaagggccttccaggcagagggggcatctgcagtgaagacacacaggtatgtttggctaccaggtcagtagcccgtgtctggaacattgggcggtccattcgtttcatatggctgctgctacacatttctacaacacccagttattctcttacagctctggaggttagaagtctgccacgggtctcactgggctaaagtctaggtgttggtccttcccgaaatctctggggagaatctgttttcttgccttttctggattctaaaggtcgcctgtgctttggcttatggcccctccctccattctcaaagccagcagtggcaggatgagtccttctcacactgcatcactctcacctcctcgtctgcctcactctttcacttttagaaccccttctgattagattgggcctgtccaggtaatccaagataagctcccccagctcaggctctttgattcagtcacacccatgaaatcccttttgtaaggtagcatgttcacaggttccagggattaggtcgtgggcatctttgggggctattacagcccaccccaggtgggatgcagaaactggcagcagatggggctggaagggtaggcagaggctctgcgggacacgctgcaattgaggaagcctggagaactaagcagatgaacaggcaggcaggagacagctacccctcaaatgctcttcagttgtatggcctgggccccacctcctgccctgtccttggcagatccctctgaccttgcagccccggtgcagggtggaggcatgcccagtgggcccctgggtctcagaaacagcaaccttttgtccttttgtctggacaaaagagccccactttgttggtacaagttaaaattcttccctcagccccctctccactctactcccatctctagggtgcccctggtctgagcccgctgatgttcccaggttgcctcctctgtcctgggcacccagccacatcctgcccttcttgcccgtcttctccattcacccatgtccttgttgctgtggcgcctccaggtagggctcctccaggtagccctggctcacgtctccccaagctctcctttcctttttgcactaaaaggctcaaaaatcctcctccatggccatctgacccttccactcccctccccacctagtcacaaggtacccactccctggattcctcaagccatagggccctatcatttcttacaggacagcagttccaagccaggagagcataggggttctctccagccaatttgagccaggaggaattttaaccaaaagcccaagttggcttttgaaagaggcctttctccaggaaaggattagagagttccagtcattaaatggtccgctgcagaacgctagttcttgactaaagtggttggtttttaaatgaaatgaaataaatgtgcctttttgttttttcaataaatgagaacaaaagtagccaggtgtggtggcatgcacctgtagtcccagctacttgggaggttgaggtgggaggatcgcttgagcttgggaggcagaggttgcagtgagccaagatggcactactgcactccagcctgggcgacagagtgagaatccgtctaaaaaaaagaagaatattgtcgactgtgatgggaaaacattctgattcaggcctcaagtatatgtatgagaattgaagttctgtgaaggttcgtgcatgtctcccttgattttgatggctcttgttaaaaaacaaacccaaaataaccttagaaactgtgtgcacacgtgagtgtgtgcatgtgtgtatgtacacctgtacacgtgggaaatcgcgacggcgtgctctgtacaagtgcagatctgctcgtggacagtttctcacccctgcagggccagggccctagggctcccaggtggctgccacttccccattgaggctgttccttgccagaagacctagggtccggtctttcaattctcttcctgctgtgaggaaagtgtttctcttgaaaacaggagccagcccaccccaaatcttgatgctgggtgacaccaaagacaggaactcttttgggttaaaatttggggctacaggtaagacttgatgaggcttctatcccagtgggtttactggtgaattgggaatgagtggtgtgtaaaggcagccggagcggctgtgcattcgttcagcagccgtttatggaggccctgctgcatcctgggccagctcagccctggcgatcaagctaagctggtgctccctctcctccacctctctcttctggaaggaaaggaacgctttcttcctttaaggcctaagactcacagctggcttgaggtagaagtcctgcctgccctgaatataaaattttaaaacttccatatttggcaaatctgtaccctagttttgtttagttgtgtgtgggcgtggggttatattcagcactggaaattgtgggagcccagctgtgcatcaacagcttctccatccagttagggagagtgggagctccccatctaagtttaaggttgcagctcttcctcccatagatctgtggtttaccctcagccccagcccctgcaacaacactgacccctggagagcccagacaaaggctctgagaagtcctgcagacacacagccagccaaggaggtttgcttagtaagagctgcccctcatcagcagctcaccatgtagggggattgaggttttgtttgttttgttgttgttgttgttgtttgtttgtttgtttgttgttgtttgaggcagggtcttgccctgttgcccaggctggagtgcagtggcacaaacgtggctcactacagcatcaaactcctgggctcaagcaatcctcccacctcagcttgccaagtagctgggcctataggtggacaccaccacgcctggataatttttttgattttttgtagagacagtattttgccattttgcccaggctagtcttaaactcctgggctcaagctatccttccacctggcctcccaaagtgctaggattactggagggagccactgtgcctggccaaggcagctcatcatgtgccaggcactgaggatttaagtgtggaggccccatgtgggaggggcccaggtagcacctgaccccagggccactcagctccagagccctcggtctcctccgaagcttcacctcctctcactccatcctagcatcacccaaccatttttctttccttcctaagcccatgtaataatatctgccagtttcctccaacactgatttgggctaaaggagcccagaataaacaggtggccctggccctaagccccagtcctctcctgaactggggcaagccctccacttccagcctcctgctgcctgtggcgctcccctgtccgctgggaggcagggaggctggcccagggggacctgacatgaagagtctgtcttacagggctcaaggggatggctgtggtctccccttgcctgtgtgtgttctacccggaatggaaaccagcttttcaccttgtccaggaggttggggacctgagggaacacagcactgcttctgtcccagccccccattgctggttttctctccaccagcagagtccaagcccaagccgtatgggccccagcaggaccacactgagccctctctccagccccgcggcctggctctgggatgtacccataccaccccttttagtcccctgcttgctgagtgtgtccccttcagctctgggccttcatacaggcccatccctctgcttgggatgcttattcctgccaccatggtcccctgtgtttgggcaactccctgacaccttcaactctgcagacagcttacttcctagcaaaatcttccctgaccaccagatctctctctgttcatggcatttcccactgtgtgtgattttctatttttatgtggttctttggttcatgtgggtaccaagctgcttgggggcagaaaccccaattcttgttcaaagttggatcccagggcccacagtgtagcaggtactcagtgaagacaggccagatatgaatgaatggaaatgcgagtgggttagggtccgagcccacaaatgaggacattggccttgttttccaaaaatagaccatgactccagggccctagaggaagcctgtaaacctcctggtctgacagacatctgacacactttgcgtgggtctctttctccacagagaagttggaataagatcaagacttaattcgcaggcccagcattagtcttctgaactcgccggctatatgagtcatctccactgtggagggaggcaattttaaactggaaaggtcaatcgacatgtcagaatatctagtaaatcattcgcgttccacctggtgccccttccattcccctgaaaaagcctgcccttgttcagcgcctctcgaagacactgtggagaaagaggtagccggggctgggtggtgatttacctcgaggaaaattaatatggtgccatcaattctgaaggcagaaagggcccatggccagaaggctgcacgcaggctggaataactcacggcccatgagggccctgagtttggggaggcctctccttggccctggatataaatcagcagcccttttgcagagagagagtcggagttttgtcaggcctgggggaagggagccagcaccagaagcccctcttccccaggagcctgtcgttgtctgaagggttgaaaggcacctctgtgccacccttctcggccagcaccaagcactggactcatttacagacgaggccatgaagcccccaccctgggttccaggaggatcacgggaagggggctttcagcctggctgtcagagaagaatgtgacaggcccattttcactccacaggccttaattggatggtcagagggcacatctgtggcttataagaaacagatggcgggatgggttagtgaaggagaaagcacgcttgcttcaggttgagtgcccgtggaggtgctggggcagcacgctggcaagcaggcagactcggccaagacccagctttgtcacgtgcgtgaggccttggctgtcctcttcatctttctgcgtgtctgtttcttcagctgtaaaatggagatgatgaggcccaacaacataacataggaggatttggtgagaaaatgcatttgaaatggctgaagacagtgccgtgtgttataagtgcttggtagttgttattgtcctgtggtagccttgggtctctagagccaagaacagcctcctgtctggatctgagtggcttcatcccactgtgtgggactctggtcccaagtgttgtatgtgagtagctgggaccacaggtgtgcgccaccacacccagctcatttttgtattttttgtagagaaagggtttcatcttgttgcccaggctagtctcaaacccctgggcttaagtgaccctcccacctcagccttccagagagctgggattacaggcgtgagccactgtgcctggccgggaatcccatttcaacctgagattgggcggggacaaacatccaaaccatatcagtacctgtgggaagtgacttggaggcctctcgggtcttcagctagtcctctgggcagtagggagaatcctaagtaatagccgcttcacagggagtcagtgaggatgaagtgtgtggagcgcagagccactgtttgttgaaagtgcattgttactgttattgcctttgttttggtagttaggcttgtttccagggaactttggcttccttggcttctggggtgtgcacacaagcactggaccaaggatgaggctcaaggagggccctgggctcatgccctgggctgacagtggaggccatggggctggtggggaggagcacaggcctgaggccaccccacctggctcaagatccccactcgctacctctgtgacctggacaaattcctccacctcatctgtaaagtggggctaggaactgtttcccccttactgtgggattattatgaggattcagtgatgcgatccatgttgttttaacagtgctttgctatatggtaaggcttcggatagtacctcactggtaggtaatttcctgttaaggacagccaaagtggaattcagatggggatggtgagagccgagacattattttgtttgtttgtttgtttgttttgagacggagttttgctcttgttgcccaggctggagtgcagtgtcgctatctctgctcactgcaacctccgcctcccaggttcaagcgattctcctgcctcagcctcccaagtggctgggaatacaggcgcctgccaccatgcctggctaatttttatatttttagtagagatggtgtttcaccatgttgtccaggctggtctcaaactcctgaccccaggtgattgagagccgagacatttatgcccagttcctgcctttccagagcctggtgtcatcttttaagtcagcgctaccccatctccttcaattcagttcatgtcacctcagctcgacagaggcagttctgtgtctgggcaccaggaatcctcagggggaggccctccagcaccacctgagatgtttgccgtgtcagagaaccaaccttgtgatcacttacttagtaattttctttgaatgtactcacaatttatccctgtcagggcaagatggagtaagttaagctagtccaaacctaaacccgtgaaatcaggagatccataaactaaatatgtattttctcacaacatctgaagctaaatagaggttgagataaaattagaaaccattcacgtaggtgccatctaaaaccatcttaggtccctgtccccacccccatcccccacctgctgccccctatagtctgcacacaaggtggacttgttaaggctcccctgggacccctgcctgcccacagagcctcacctggacccggtcccaagagccaggcccactctcacgtccaggaggaagccctgcctccccaggtgttaggctggacttttcgtcatacagcacagggagagtgaagcagttaacaaaccacatttaatatgcagtattgtaattttaaatttgtggaacaaacctaaactactacttgtttttttatgctacctatagatattaaatgtggacagattttgcttggcagaccattggtttagaaggctgggttaagccctgtgtttgagtaaaagtagtattcaagtaaaagtgggattcaaccccaggttctttttggcctcaggcaaggaagttctatatctgcctcaccaacacttcttccaggagggtggagaatcagatatgaattatttctcacaatcaccaggaatggctgcagctctgctggacagattctgcatctgttcccaagctcatcggtcagcttttacatgggtacaccgaggcccagagaggaggacggggcttgcccaggtcgctggccaggtcactgtgctgcttccacacaaggtggctgggaggggaggcctacccagtttgaggcaggaagtgtctgagaagctggtcagagctcccccgctgtgcagccgccctgggctcctccacctgggagctcttgggacaagtctgagagcctttgaagcctctgcagcctgagagtttcagagctcttgctaccttcagatcctctttccatacagaacaccctgttagagctttctctcagctgggggctctctgtctcgaaaggggcctctgtgctgacagccccagtccctcagtgcggatcacacatgtggccttgccctgtgccaggtgcttgactgggcccttgctgaatcagatgaaagaaatcctctggaatcctcctgcacttctgcagcagctaacaactttgtttcatgcttttgaggccagaggctctgagaggtcacatgaccagcccaagcatccacagctaggactccacagaaccagctcatccttgccaggtgggaggcagtctgtcccacaccagggtatctgaaatgtttctgcttcaggtgctgtggctgatgcttccgggccattatctgtgtaccatcttcagctgggtgtgggtgaaagcctcgttggggatgggcccagaaagaccttggtgtatttctcacacccaaagaaggccgccaaggaaggcccatggcgacccctgggtaggaagcttggtgctctcagggagtgggatttgtgccatctggtgcacagcctcgggcaggaagtgcaccaggcccccagccacgcgcggagagcttctccagagagggctgtgatgtgcggctagaggcagtgcttggcacccctgctcctttcacaggacccagaagtttgccagatcaaaaccttagcattggctggaaaattggcttacttattgccatctgtacccatcacttacccatggagtgggcgccgtcctgggctgagtcgggtgggggtcctgccgttgagttagtaatttcgggttttccttttgttgtttaaaggcatacttgttaggctaccaagtaatatagaaacatattcacattgtaaaaggctcaaacagtgcagtttgtagagtaaaaagtgaaagtgccctgccatttccccagccacccacagtaccccctttccccccaggccacctgcttctccagcaggaactcccagcctccgttcaggggagggggagggtgtccttctggaccaagctcttcgcacctgcacacatacgtattcctctgggtggatagcctcgggctgtcttgttcaccacggtcactccagcccagccacaggcctggcacttagtagacacccactaaatttttactaaatgaatgacagtagcagtagtttttacatgaatgggaccatggacatcttgttctgcacttggttttggcactttaaagtggggttttcctgcgtcgggacatcagggtatgagggtgggcttatctgccgtcattgcattaaatggaagcacccgagggaccatcccttgtgcatcacccttgttgatatgcattggctgtgtccaattgtccatgttacagaacgctgaggggtcagccttttagcaactcagttcacaaacacagcactttgtcaggaggcagtcctagctgtgaaattgctcaaattgccctccataaaagaagctgcccatcaaacctcctgccaacagcgcagggaaatgcctgttcctcccctctgtcccacactggcccctgttggtctttgtcatctgtgccagcatgacgagcagaagcttacccatctgctgagcatgtccacctggtcgcctggtcacctggtcagaagtggctatgggaattcttcccatatatcccaggtggccagggaagggcccgactcaggaaatggcatctgtaagaatgatagggcagcctactgaggggtgctgggcatgactcgcagcatgggctggcccacccagccaccgccaggcaccggtccaaaccagtcaaccctgtgctctgctccgttttttccatccctgcctttgctcatcaatgaggtgccagaaaaggcttccagcggttggaattcctgcctccttcatgtgtgtttggaggccacacagctgtgttctctcaaacctccaccatcctttacactcagaatatctgtttagacattcctaactctgcttggtcgttgtttattttaaaatagtcccagaaatacgcttgcttatttagttctccaccaaacactccattgcgtagaatcatgcgtcccctgcattctggttccctggaagaaccgcagaagggggacctgcctcatacgaccaggctgcgtcagtcatgggagtgagctgtcagacattcacttttttaaaaaatagaaacagggactcgctatgttgcccagtctggtctcgaactctggacctcaagtgtggtcagaatttcactttgaaattcttgggttgaagaagagcttaagaatgggctgttactttcctgtgtttgtggattcatggaatgattcttaggggccattgtcaggaaagggaccatggacaacccagctggagttcttccataccagatgtcctcaggcagcggagtgatgttgatggctgtctgcagcattgccggggagcctgtgtgtgaagccttcacagtggaccactttcctattacatttctccgcaactccccgcttacctaacatcctgcctggaggtccagagaatctacagtccagtgttttaggaggctctctggatttttgtttctattttattttatttagttagtttttgagagagagtctcgctctgttgttcaggctggagtgcagtggtgtgatcttggctcactgcaacctctccctccctggttcaagtgattctcctgcctcagcctcccaagtagctgggattacaggcatgcgctaccatacccagctaatttttttttttttttttttttttttttggtatttttagtagagagagggtttcttgccttgttggccaggctcgtcttgaactcctgacctcaagtaatccacccgcctcagcctcccaaagtgctgggattacaggcatgagccacggtgcccagcctattttaattttttgagatgaggtctcactacgttgcccaggctagtcttaaacttctgggctcaagcaccccgcccaccttggcctcccaaggtgttgggattacaggcgtgagccaccaagcctagccaggattttgcctttaaagcgcctaatctcctttctccataaagacgtgaggtaagcagttttccctcctgtgtttatatctcccccaactcacaccatgagctgcttctattaaaagacacaggagatggataactggtgttgaaaatgatatcacttatttcaaagggtaaaagggaagttgtgtgtggctttcagtaaaagctcacaggcctattcagtatcggccacttgatgaagaagccttactttgtggtggatgcccccgggtctggccccagtggcgcctgagaggcagcaggtagaggcaagagcatgctctgaaggctgtgattcacctcgtagggcgggtggggctgtgtgccctggcagccttctgcacctactgagtctcaggcctcccccacctctgcagggctgtcctgaggggctggcactgcacagggaagggcgctggctcggagatgggtagagttagtgggtaaatgggtactccgcagagtctgaccgccagcattcaagctacctctgctgcttgccaaccaggtgacctcagcacatggcttaacctgagcctcaggtttccttcatctgaaaaatgaggaaaattgtcaggaaagctttgagcacgatgcctgaaacacagcaggcctctgataggtgtaagctcaagttccatgactcaggctgcagatgatctgctaggctttctggtaacccacgggtagctgaacttgatgcctgagctccccctcgtaagttaccccacttttctttgcaggaaaggtgtgcttaagtaacaggtactcagcaggggtgttctgacaccctgggactgccatgggtttgcttcctcagaaggcttccccgtcggctgccctctctcactgtagggtctgcttggactcagtgtgcagaagccctccattatcgacagaaaacaagctccttaaaaacacacttaggccaagcacagtggctcacgcctgtaatttatccagcactttgggaggcaggtggacagatcacttgaggtcaggagttcgagaccagcctgggcaacatggcaaaactccatctctacaaaaacgaaaaactagccacgtgtggtggtatgcacctgtagtccaagctgcttgggaagctgaggtgggaggatcgcttgagcccagcaggtcaagactgaagtgagccaagatcacaccactgcactccagtctgggcgatagagtaagacctgtctcaaaaaacaaacaaaaacaaacacacacacacacacacacacacacacacacacacacacacatgccaggtgtggtggtgggagcctgtagtcccagctacttgggaggctgaggcgggaggatcacagcctcccgggaggttcccgtgagccaagatcataccactgcactccagcctggctctgtctcaaaaacaaaaacacacacaaacacaaaaaagcccatgcttaaaccaatccctggcttgcaggcatttccagcatttccttgaacgtttttgcaaatacagatttgaacataactgatttcagttcctgtccccaaaacttttggttccttccttccttttgttcgtggcacaatggtgagagtaggtgctctggagtcagaatctatcagggtttgaggactgggtctgtcgtctatgagctgtatgacttcggccgagcttctgaaactctgtgggcctcggtttcctcttctataaaacacggtggtcgtgacaattaaatatactaacaagcgtttgatccataatagaatccccaatgcatggtgactgtcgttatcctcatcatcatgactgtccccagtctagtgggagacaggccaggaggcaggaagctccccctaccccagtgtcgaggcccccatggagcagggaggagctgggatgaggagcatccttacctgggcaatctgtccagacccatctcagggatctcctcctcctgtaccccccaccacctccacttccctgctggctcctacagcctttgcacccccttctcatggtgcttttggggcatcacatggtgtgcaccctcatctcttatgaattcagctagacctgctcagcacagcagagtgagagagagaagggcagtaggcttcactggagtggcccttccctgccatccctcacagtgagcctgggccctggagttgggacatttggagaacaaagccacttttcctcagccagtgcggttaccgtggccatactcgtcccagtgagtatgagtctaggactcaaaaagtgcttcaaggcctcctaaaccctagctgacacttcctgtggcactcaggcaaaggaacaaacaggcttccagtgtacaggccgggagcatgccctgctggacacttcagtgattctgcccggactcaagggttggaaggtgggcagtgactggtcacctttctcttcatatctataccgcctggcactgaggagtcaccaaatgaatctgtcttaaagcaaagtgggcgtatttttgaagaagtaaatatcagccaggcgccgagggtgggcagatgcaccctgggcacagcacaggtggaagagggcagggcgtgtacaagactgagcaagaggaggtagaaggcgagccaggatatgagggtgtggcagtgcagagaaggggccctgctgaaggacaggaaagtgggctgggagcagctccaggaagcccacttccatggcacagttagcagggatgaggtagcaagaatggaggcggcagctggtgaaacatgcctctctcattcaccccaggtgagaggacagtgacccaagccacggtgcattcagggatggggcaggcttggttagaagggaggacccacaggcttcctagcctgttggggtggaggggtgacgagggcctttggacgacaggcaggtcctatcatgtgcttgtagaagccatggtggttaatttctgccttcttttgtaactgtggcattaggaagcaggactgaccccattcctctaaatcatgccctggtctcaacctttcctccagagtacttcctcttttgtacagggccccttcccagcctgtggctgtcctaatgaaccaccttgctgtgtcaccttcaggtgaccaaagatgaaggctccaggggctcaaaggggaaactgaagggtaacatgagtcaggggttccagaggcttgactcagaagctctgcgcctgtcctgggcaggccgagcctgataagtttccagccctaaggtgtgattgcagtaaaccttctggaagccagagccggcttcatctacagatgtgaggtttgtgggaggaggcagaagtgctcttgtggcttaacgggccctcttggctccagctgctcagaggaggggcagctgagagccacacaaggccttgcctctgaagtttgaagcatttacaggcaccacctccccccctacaactttttccaggccacatcaggcaagctcctttcttaagaactgaccttgtgtgtctctttttgcatctgagttctttagaaaaatctctcccttttttcctgtggggccctgcatgcctgccttggccccactgcccgaatatgccttctctcatttccctcctgcctctgccgtgtagtttctaatgtagctcaaatgtgaaaaattaggtttgcatggttgccatgaattttacgtgaatcacatttaaatcaataaagcctgtagaatgaatcaagttatcgttattatgaggtagcagggggctatttaaaggggctgtgggcctttaagcacataatggaaaaagtttcctactactggatgatccccgataaagcacttaaccttttgcagctctgggctccctcagtacctgtgatgcgtttgaagtttctactttcttcttagcaggtgtgatcaagcagaactagaatgaaagtcacattttccatgacttgtttcttatttgaacagttgctaatctttttttttctttttttttttaagtgggtagtcttttaaatgacattctgtttcaaatgtgtgagcttgggatctttgatgtaaatagcaggaaaaagtgggcggtaatgttatggaacgtggaaagcctgccttttctaggtcgtgcttttagagcaagaaccagagagaagaaagaaaggaaagagaagatgaaaaagaaaaaaggctgtgcaggggtcacggctggaaaggccctcatagcagcctggcacatcatgttctgactctgggtgcagggctccccccacctccccattttcaccttgatcagtcctgacattctctccacgggccagctctggtctgtgtgttgggaatgaccactccaggaacagagtccaggcagtcagcatagctgagggtttgccacagtgctctggacagttgagtaagacaggagctacagccgggcacgatggctcacgcctgtaatcccaacactttgggaggccgaggcaggcagatcacctgagatcaggagttcgaaaccagcctggccaacatggtaaaaccccatctctactaaaaatacaaaaattagctgggcgtggtggcaggctcctgtaatcccagctacctgggagcctgaggcaagagaatcacttgaacccaggaggcagaggttgctatgagccgagatcgtaccgctgcactccaccctgggtgacatagcaaaactctgtctcaaaaagaaaaaaaaaaaaaaaaaaaagggagctagaagcgtagctgtagcgtaagattggcaccaaaggagaccttcactttggaagttaatggactcaaactcctgggttcaagcagtcttcccacttcagcctcccaagtagctaggactgcaggtgcacaccatcacacccagccattaccttttaattacacaaatactgtgcaaataccttgtccttgtaagaaaacaaaactaaggccagataccatggctcacgcatgtaatcccagttactttgggaggctgaggcgagggttgtgggggatcacttgagcccaggagttggagaccagactgggcaacatagcaagaccccatctctaaaaaaaaaaaaaattttatgtagctgggtgttgtggtattcatctatagtcccagctgctcaggaggctgaggtgggaggatcatttgagtccgggaagtcaagcctatagtgagctgtgatggcatcaccgcactccatcctgggtgacagagtgagaccctgtctcaaaaagtaaaataaaataaaaactaagtaatgtccaccctcctcatcccacttccctggataaccacagtcacagtgggtatgttttcttccagacctgtgtcccaagaagcacacagagacccacgggaggaatacagaccattgaaagttttctaaatttatttcctgattataaaagtattatctattcactgtagaaaattaagagaaacaagcatttaaaaaacacttgtaaccataccataccccaaagataaccacatgagttcattttacaaaaatgaggtcaccctgtgcacgctgttcgataaccttaatttttcactccaggccttatgggggtgccttgtccctgcatcaccaagctgtgtgtctcatcaagacttttccagaggtggtgcctgaggcaattcttggttggcaaatgtaggaatattttgtccatgtacgtaatcatgtcttctatgaaagatgatgctgattttgcgttgatgtaaatgaaattttccttataaatttcaatacaaagggagggacataatctaaagaaaacatcacataaacggtacaggtggtacaactaggaaaaaatccttaggatggtcaggaaatgactaaagtttaggaaccaccattttaacagcatttttaaaaaactgactgtataacatgccaccatgagggcctgccaagatttagtttcccagtatctgtgaatttttccctttttaagtcctccccaccccaagtttgaacttccctgtagctgaatctctacacccaaccatgagaacggcggtaacctaaaattctagaacaggttaaaggacatgcccagctgaaagacttctttgccaattgccaagttgccctccaggaaggctgtcccagtgtgagcagctgggtgagtaaccaggggctgttttcctgatgaaaattcacaactgtgagtaaatgcctcacatcccttaccaattttcttatctgaaagatttaatcagctccctcgcccttgacaggtttctttctctgtgttttgggggcctctgtaagtgccttttaatatttccattgtgtgtgttaatctttcattagaatttgatgcatcagaaatatttttaaaaagcttagttcaattaatttccttccctgccctattattttacttccttctttacctgaatcattaatggcaaggagcaccgacacagaactgagttcagggctgttctaattaactcccggggatgttatgagcaatccatcagtcctggggttgcattacagcctccgtatttactggtgttttttcagtgagctttccctgtgtgtgaaaaatccagcagctttttggccccattggtttacatctgttttatgaatggcctgaaacgtcttgccccagtgtctgagagtgtgatgaggaaaaggattttgtgctttgctttgtttttcaattatccatgggctgtgagttccttgcattataatagcaggagcacaaacctatgatcagactccaccaacttcagtgttggctcagggtatgaccttgggcaggtttgtctcctcagctggcccacgggcgacaggtgtagggaggtctgcctcccacaagtgatgccacaaggccaagtggtatgtagacttggctgtgtggtagaatcacttggagagctttaaggcgcccggtgcccaggtcacaccccacaccaattaaatcagactgtctgggggcaggagccagcatctgttttcagtgatcccaggtgatcctacatgcagtagagtttgggagccaccgctctagggattaaccgaggcctctgcagcacgcactagcatggtggcaaacaatgagttctcagtgcccacccctcaacagaaaagccagaagatggagacacagaagtcagatcctgctcagccccatctccaaggaacggccatgtgagcctgtgtactgagaatgcgtgcctgtgcacgccgaggatgcagaaagggacaggggaccaagtggcaggtagccttttcttctaaactgctaccaggtatttgcatcccagcctgtttagtgttgctgctgagtcccctccaccttcaagaactgtcagcctcttcagtaaggagacgtggggtcccagctgtggcttcctaagagctgagcgtgagggccttagtgtggccatccataatggtatttgggatctgacaagtctccaaaccacttgtccatagaccctccagggccctgcaccctgagaaccagcctggtggggctggagtcctaaaatctgcactttgtcccagtaccgggtgccccaggctgccaatgggcctcccttcgaggaaccctggatctctcccaagacgctgtgtgtgagcttcagcctttccagttgcctgcacattctcgcccaagtgctgtgtgtgggagtaacttttcaactccttcgttcaagagcctttcccacccctccactgggcccagtcctatgtgggggccaggacagagagatgcccaggcagtgagcaggtcagaccctgctcatcctcagaggccagggtggagggaggcaggtggcccatgaggaatcccttccagcagtgagacctgtggcaccccatgcccattgatcatacctacttgctctgtgacacggagagacagctgtgtgggaatgggctttctgtgtgctctgcagagagcgtggcggctaaggtgaggcatgggagtcataacccccaggctgagtgagccaagagccaagagtgcatgtggccagagcgccccattccttccaggtcagggagctccaaggccctgggccaggctgcttcatgccacccgggtttgccaggacaggtcattctcatgcacggctcatcggcagacgtggagcagagctgtttcccacggtcccacacagtggacagggtctcgttttcttccctctaacccttcgctgtccaacacggtagccacttgtggctgtctaaatctacattaatgaaaattaaggttaaataaaattaaacatttctgttccactgtcacaccacatttcaagtgctcagtcgtggatagcaagacaacggaaaaaggatatttaattgtatttaattttaattgaaatgcaaatagccacatgtgtggtggctctgtactagacagcatggtcgtaggacatttccatcaatgcagaaagtccttttgggcagcagcgctgtctagcaggtggggtaaaatcaggaaacaagaaaggcaagggtttggagtctttcaggatcccagctccgtcactttctagtgtgtggctgcatgctgtcaactctgctggggcccaggcgtcctcgtctggaactgaaagcccagatttgtgtggctacctcctcacccaggtgcgaggacggggcaaagtgaggatggtaacagtaacagaggtgtggactgggcacttgctctctgctttcattcttccctgcctgggacccacgtgctgttttcacccctgtttacagatgggaaagtagaggcccagagcctgtgctgtgtttaagtgtccagcatgtggcaggaagcagagacagtggggattgtgattcttacctatctagccagagttgcacctggggtttggaggcacggctgactgggtacacaggctctacacccctgccaagtgtctgaccacggtggctctgcctatgacacacttatttactattggacggcctgactagctcttttcttaacttttgcctaaaaaaaattcaatccatggcttcctagctctgaacttgcctctgtgcatcaagctgaagaaggtgcaggagtttcagagccagtcattccttaacagggaggtaagactgcgggggactcagcaatttggagcctgggctttctcaccacctatcatgccctcctacggtcctgccaaaatctcctgtctctctttcacctttccctttctccgcctgctggtggatttcctctgccaagaaattagcaagagcagctgaaggcggtgatgcacacggcccggccaaagtgaagtcacccctgctcctgctgtgaaagctgctgatctctttcttagcacaggcagccaaatgtggtttacccttctggtccagatttcactaacttagtgtggcccagagaatctttttacaagattggggtttggtttcaagcacatggagggacttggacctgactcacttgggcatttcctgcttggggtcctgggaattgacctcccggaagataacattagcagcacaacctcaagtcagttactgaccctctcagggtctcagctttctcatgtgtaatgtgcagataatggtactgcctgggctgggtggttttgagtgcttagctcagtgtcagatgcttattaaatattacactgtaactgttagtatctgaaattagcatgggtatatgtttgcaagtggctggaacttttgaagagtttatttgcagggtttgcagatgaacttttaaacaaagtctgtaacgggttgaatatacctttccattgtgctggtacagtttatactcacagatttctttcagttactgctttatggtctgtctgttgagactgtggctgcgtgagggccagaccttcattttcagccctgcagccctagtacctgggactgtgcttggcccatagtagatacacagtaactgtttgatgaattaataaataaaggaacaaatgtcatgttattttttcttaatatgcttagtaaactctttgttcgtgttatattttaagttccagtccaggtcttcattataagcttccaattaagggcctgagttacatttcactgaataatgataggcaaaaaccttcagttctcgcagtgatcttcctagtgtccccagttcctgggcaactatttatagtcctaggtgtggctttaataagccacccttgttgatgggtccccaccctccgcagcctcacccccaacagtcctcactgccctcttcctcatatcccagccccaacaaaggacaggagtttcccaaactcaccatgttccctcctgcctctggcccatggtacatgccccttccctgcatgtccttgactgtcgcactctgcgtgtcacactctgcgtgtcttgttcattctgttttctccctactgggctgtgaggtcctacagagcagggactgagccttttatcttgtctctccaacaccttggatgtccaaggtaggcatccctcctctccacagacgtctagtgagcacataccgtgtgcctggccatgagcagtgaacaaaaatgacaaaaatccttgccctcatagaactaatgttctagaagatactccataaaagtttcttgaatgaatggagctcccttttttattttgcccttcatgaatttcataagtagttcgtgtacaagttcatttttttcttttcttttcttttcttttttttttgaaacagggtatccttctgttgcccaagttggagtgcagtgatgcaattatggtcactgtagctttgacctccctaggctcaagtgatcctcccacctcagccccccgagtagctgggaccacaggtgcacaccaccacatccagataatttttgctttttttttttttttttgtagggacacggtcttgccatgttgcctaggctggtctcaaactcttgggcttgagcaatctgcctacctcagcctcccaaagtgttgggattataggtgtgagccaccgcacctagttcatttttaaaagaattaaaaactcagagggaaaaatagtttgagattctccatttttaccatggctgaaacgtagtttaaataaggccatctgattgggggtgtggtattgtattacacacagctgtgctgataagattgcgtttcacttaaatcacatgcttccagaatgttgctctgctgcccaaagtttattagtaatcagtttgaacacaaaagattaaaaacgtaaagcagggaatttggtttgtgaggtatacgcttttgtttaagtccaaaggtacagcttgtctccaccagaggtctcctatattttactgttaatgtttgaagtatattgaattcccacaagctaattaaaaatcagactgctgtgccggtaagcattcactctgtgaactaatttctgccaaacggctataaatgtgtcccctggtatgaaatttagacattctttcccatcagaaaagaggcatgtggtttagtcccaaccgcttcatttgagtgacaaggaagctgaggtccacctggaaaggtcggttgccctgactgaggccacacagcctagtaagtggccccactgggcatcagacccaggccccttctccatctcagctcagtgttctccccaccaaatcctgctggttcttgctgggtggaactcagagagctgctgttactcctaagtgccaggcactatcctagcaccttacaaacatcattgagttttcatagtaacactatagggacagtattgttaatatcacctctatttgctgatgaggtacctgagggccagaggggagacggcaacaagccgaggtcccacactggtaaggggcagagctcagtctaaagcagcaggcggcctggtcctcactgtgccttcaccacaaggctgaactgtccctggaggctgaaactcagggacagacacagagggagggcctgagagatgggcaagcgaatgctccccggaccttctggcggaaatgaggtgaagagcctcaaaccccagaggtttggtggaaaatgggaggctagtgctgggcccacaagggtcagatccaagaatatgctggggaggagccagcagtccccccagagaggcccagtggcgctgctctccacctctgcttggcccattgctgggcttctttcaagatcaatttaaaacattacctcctgactgggcacagggctcactcctgtaatcccagcactttgggaggctgaggtgggcggatcacctgagatcaggggtttgagaccagcctggccaacatggtgaaaccctgtctctactgaaaatacaaaaattagccaggcgtggtggcgcatgcctgttgtcctagctactcaggtggctgacacaggggaatcacttgaacctggcaggtggaggttgcaataagccaggaatgcgccattgcactccagcctgggcaacacaacaaaactccgtctcaaaaaaataaaaataaatcacctcctgcaagaagccttctctgacccttgggctgtgtcatggcctgtcttccagcagtctacatcctcctggtcttcccctgctgtggctcttgtcccatggcatgtaattgtcacttctttgggctcccatgctagacaggaacccctgagggacaagtcttacccatctctgtggtcctctttgccaagcagagtccagcacccccagaaatgtttgaatgaaaagtctgaggcagtgatgaatgggtgtaccggttccatctatgaagccttttcttccccacaactggcctatgtcggaggagaatctgggttggatgttagcaggagagaatgcctccttgcttagaagagccttgaatgccaggctcagatccatttgaccagaagagctccttgaggtctggccagcatctgtgggtaccaggatcccccacagatgtgtgtggcacccacagatgccttctctagcagtgttagtaatatagatcccagaggtgagttttgttttggggggtttttttgagacaaggtctcactctgtcgcccaggctggagtacagtggtacaatctcagcttactgcaacctctgcctcctgggctcaagcagtcctcctgcctcagccttccaagtacctgggactacagccatgtgccaccatacccagctaatttttttttttattaaaattatctccctaggagtcatagagatggggtctcactatattgcccaggctgttttcaaactctgagctcaagcaatcctcccacctcagcctcccaaaggatgggattacaggtatatgccaccacacccagcatatcccagaggttttaacatattctctagactatgtcctctgcctggggacctcaccccctaaggaaggagaataccctgggccaggatctgctctctggaatacccttgtgtacttttctgatgaggtgccttacagaggaaatccaagggaaagagaagatgtagccccatcttcaagaacttctctccagagggaggaaggagaggtgggcccataccacgaaggtggagaaaaatcacaagccctctctgcaccccagcttacttgttcccaacagcattcctacaaagtaggggtgtcctcatttttcagataaggaaacagcctctgaagggtcacccagtgtaaggatgcatctgccttcttcatccctgtagcccagtacccgacacacagtagccccatagccctaggcacaaatggggtagagagaccctgaccacatcctgtggaaggtccagagcagagccatcacagagggcttccgaagaccaggatacccttgttcctgggctgctgggctgctgaacagcggggaagaggagctgcgtgaacctagattccatgtgactttatctggctgcataatgagcttaagtattcagatcttttcttggaaatctcaagtattccatttggctgcctcacagagttaggcaattttatttactcatgctaaacagggccattttcagagaggaaattatgcaatgtactatgcaaatgtggcattccgagagcagagataagtgtggtcaccgatgcattgtaagatgagatcgtgtctctggcagctgggtgtcacttgataaggggatatgccagactgtacttggaactgctgctcccttggactcggtttctggtaattgtgttttcaccaagttgtcaagctgtgaactgcacgtattgaagaagaggaacaaggagtgaagcttttgcaagttgctcatccttaagtagacttcagcagtcagagaggctgcccccatacatgttctggacacatgggaacaaggagggtaaaattctcatcctccattctcccaagaagagtcttaaaatttgacacgggggaaagatgaagacacacaactggttttcctggccactgtgaaaaccagtcacctcattttactagacatggcatgtgcctttcacactgagagaaaggaagtagctgtggaaaaccccacctttggaagcagacagagctgagcccaaagctagcacttcccccagcctgtgggtacctgagattgaggcacccagcctccccaagccttcagctccctgcctgaaaatggcactttcagttagttattgctcctgggccgtgtaccagtcacaaagacagccaacccttcacacagccactgctcagatagttgttgagtgagccagtgacagatttatccacctctatctgtaaagtgagcattgatacagtgtcctcagtggccctgagtgtgctgggagacatgaagattctgcagagttaagagattctggaaagagtcctacagagggctccatccaaactctttccattcaaatccttgctattcaacttgggaacaaaatggatcttcacaatgataggatcctgtagtcatcacacaaaagtgatataaaggaggccagaaaactaataatttgagtgcagattctgcatactgaccagtcaccttgtgtcaaatctgttgtaatttgcctgaacttcacaacaatgctaggaagtccatttttccccaaaaaattttattttgaaaccttccaagcatacaaccaagttgaaagaattgtatagtgaacaccctcatacttgtctacttgtcttatcacgtatctactttatccaccaaacttttttgtgggggagagttagagtctctctcacccaggctggagtgcagtgttttgatcatagctcactgcagcctcgaactcctgggcccgagtgagcttcccacttcggcctccgaagcagctaggattacaggtgtgagccaccacacccagctcaatttttttttttttttttttttagatggggtattgctatgtttcccaggcgagaatagctctggctatgttaaccaagctggagtttacaggcttagtcttagtgctgtagcctcaaactcctggcctcaagcaatcctcctgcctcagcctcctgagttgtgggactatagttgcatgccaccacacctggcttctcttctttttttttttaagatacttttccttagaggtgaggaagtgaatctttttaaaaatttatttcaaagtaaattgcaggcctcagtacccttctccccaaatactccagcttgcatatcatgaagtagagctataaaattattttattaccccccgcctatagatgagacaactgaagcaaagtcacatgcccagggtcaccacagctggaaggtggcagagttaccactcaactccaggcacttggcccaggcccggcttgggactgttgccctgcacagcttctcctgcattcagacctgtgcttcttggtggggaagtggagctggaatgtgttaggagaacacaagagttttcttaacagtgctctgccggttactcttggtggtgtgggcagaggggtgtggagaggcggcagaggcccggacatcagtgtggcacctgtagtgggacgcccagtgaacagctcaaaccttaaaaccaagcagtaggtcccagtttccccgggtaactgaatttcaacaaataccccattatctacatacctcattgctggtttcctttacaaatcccagaaatgccaccagtacatttttttttttcctcttcatgttagagggtgcggcttataggcctggcagtagaaaggtgccaagacccactctctgtccaggaaatatcacacttcacaactgcccccttttcatgctgggaaggaatgctttagggagccacaaagaagaaaaagtaattgattgctacttgcagcaaataacccataagctgttgctgggttgatggagaaatggttacttaattttcttcaaaggattgatttgactgtcaggagaagcagccaacctaattgagtgtgctagttcacaccctcggtgggaacagtctcagcccttcttttgtcttgaaagtgtcctggattatgaagtcccccaccggagtgagtcgaggctcaggaaggtccaggtgtcctaccatgctgttctgcctctttcaggtgatctgtagaatttaccagggcccagttccttgtcactccagctctgctgggcttacactggaatcagcactggcttccttttcaaagcactcaagttagctcccaaggaaacgtgatttgtttatgccccagaatggctgctgttttcagttttcagtggattctgacagggtggtgacctgggagagatgcattgcactgtcctcctgggctgttgattgacccctcggaccacttaggcttcctctcccctccaccccgcactgagccgtgactcaccaggtactccccagcagtgcagtatggtggccaaggcccctcctgcagctgcattctgtcatcagggaggcatgcgaggctgattttccctcaagtcaccaatgtaattctgtgccacaaagaaccgtctccatcccacagaggctgattccccaagtgtccagcagcttggaagggtagccatccttctgctggtctgaagcaccatgagggcaggctgctgactggtcttgctaactgatggattctagcatctgaaaagagcccaaggggcggacacccagcttcagtctctcctgcatgccaggaagagaaactctcaagggtagaagagagacagcatttcctaagccaaagaaggaactaggtctcctgctcgaaggggccaccaagtgccctgtgaaagggggaccttgccaaggcagtccaggagcatggaggtggcttcagatccttggccaccagggagttaaaccctcagggcttgcctgttgagagctcacatcatttgactgtctccttgccagaaccagccaacatctcccacccaccctctgcagctagcccaggtagagggggcaccaggctgtgaggcagatgagtgctctctctggcctcagccaggggactggaatgccaggttttgatcagcttgttcaggagagtgtgaagttcacatggccatctggctgcatccctcagccacatatgtcactcatcagtttgtgtcattggggaagtcacttgtcctgctgcagtttgtggccacctcataggatctgggaccatgtcaagtggaaagttggggcttggcatataaaagcactttataaaggttggtcttggtgccagcagccattgtcattgatgaaactactgggccgggcgcggtggctcatgcctgtaatcccagcactttgggaggccgaggcgggcggatcacgaggtcaggagatcgagaccatcctggctaacatggtgaaaccccatctctactaaaaatacaaacaaattagccaggcgtggtggcgggcgcctgtagtcccagttactcgggaggctgaggcaggagaatggcatgaacccgggaggcggagcttgcagtgagctgagatcgcgccactgcactccagcctgggcgacagagtgagactgtctcaaaaaaaaaaaaaaaaaaaaaaaaactgggagcaggggccttgattcaaaacagccctgacttttttttttttattagatggagtctcactctgtcacccaggcagtggtgcagtggtgcgatcatgacccagtgcaacctggaactccaggctcaagctatcctcccacctcagcctgggaccacaggtgtgcaccaccacacccagctaatttttttattatttgtaaagacgaggtcttgctatgttgcccagtctggtcttgagctcctgggctcaagtaatcctcccgccttggcctcccaaagtaatgggattacaggtatgagccacctcactcagccctgataatctttcagtacatggctttagagaaccaaagcctggaatggtgctgcatccccaactccggtgaaagccagcaatgctcagtgttttttgccctccctgcaccacccacaggccactgcagttccccctcactaatccctggtaccagcgcagactcgggaatagaaacaagtcaggctggatgggtgtgtggaggggccaagaccacagcccctccctcacacgtgcagccacgggccctccaggtgtcctatcagctgtgggccctgctcttggaattccagggtgagcctgcctttccctcaagggatcagtgttccctgttcctcagcccctcctgacctctgattaaccacacgtgcttgaaagatttgctaatgtttactgaactgctaatttaaactccagccgtagcctaaaacaggctgttggatttcaaagccttggaattctgctggcctggatatccccctgtaaggaaaaagacttgcattctaaatgcagctggagccaccaatgctaagaattaaattatggattggcatccgtattttattgtgaagggattattaaaatacagcaaaagtcagtcagccccatttatcgctcagtaatgggctacagcctgtcagagggggctgtaggggaaggcttcagcccaggagctaaaagaacagttgattgagcagtccctggcctccaagtgggagcaccaaaagacattagcttccttccatcccatccacaaatacttcttcagcaccagccattgcccagaccccctccagagggtacagcagctagtgatactggtcaggaccccttgttttgggagcttacagtctggacagggatgcttcaacacagtcaagaatgacaggcactgggatggggctggggattagggaaatgtagagagggactgggggagcagccagggatgaggggtcaggggaggcctcactgcagagcccggggggcctgtgtatcttgcatattccatgaccttacgggaattctgaaaaacaaccgaaaaccatgattcattttctccctctgaagagactcatttagtcaagagtttgcattcagaaaacatgagtaccttaggcagaagggttccaacgagagagtcatggctccagaaatgtcatggcacttccgagcaatttgacttgtgctgggagaacactaggaccacttctgacaatgaccaccatagcttgcctctgtgatgcatgctgggcacagccccatgcccctcccagataccctgggcagtcctgcaggtggttaagtgttcttcttataaggcagaaacctgagactcagaaaagggaggtgatcggcccagggtcacacagtttaataactggcagagctgggctttaaacccagtctgcacagtgctaaagctcaagttgccgtgatactgctcttcatggtaacagcatgctttttctttcatgctttttccttttctcctcttccttcccagcatcttaaagttgtgttgggaaatggttgtgctagtttcccttcattctgctaaatacttgcaggatcttccaaggtccccaaaacagccaatcctgagttgtttctctaggccagtcttctgagatgcagcatgtagcttcttggtggtactgaaagaattttagaattttagatgtgcctggatgtagcactaaattaaattaccatcacaattatctattgctgagtaaccaaccacatatattaacttcatggcttaaaacaactatgggaattcattttgctagcaaatgtataatttgcccagggctcaatgggaataactctgctccacatggcatcagctggcgtgtatagactgggagctggctgtgggcctggaccttggtttctctctgtgggtgtctccatggctacttgggcttcctcacaacatggtggataggttccaagagcatttttatgactttgcctcagaaatcacaaagcatcacttccattggtactcttttggtctagacaatcactgaggcccactcaggttcaaggagaagggtagaccccaccacttgatgggaggagagtcaaagtcacactatgagaagaacatgtaggtaagaaatattgctgtggccatctttggaaagtatagtccgtaagaaaatccatttcagtgcccctctagtctgtgctgttacaccaaggagaaggtctcagattcagactagtttgtcgtagaaactctgtaactcagatttcctctttttatcaaaagagcaggcattaggctgtaatttaataaatggtcttttctcctctaatcagttttcatgtttaccttaatgattgtaagtaattctgtttttccattcatggtaatgatatgaagtttccttctgaaatttattttaatagaatacaaatgttttagaaaaattaagcataagctctcctttgctgctataaatttactctcgcatgtgcgtatgaataagaatgttcctttgaatgttgtagcaaaagcttctaaacactccgaatgtctgccagttggagagctgttaaatggtgtagagttctccctaccgtgggagagaacgcagctatgaaaaatcacaaggagtgtctcagtgccgatgtgccatcaggaagtgtcaaaagtacaatgtaggcagtgtgggtggcatgccaccatttaagaaaggaaatggagaggagaacatagccccatgagtgcttgaaaatgcacagtggacaggcaacaagagcccgtgcagtggttgcctctgcagaggggcacaggagacacttattatccactgtaaaaaggttttatacctgttaaaatgggaacctaggaatgtgttatctagtgaaagtggttgataagtttaatattttcaaataaaatagaatgggtcaggtgtggtggctcacacctataatcccagcactttgggaggccaaggcaggaggaccacttgatccaggagtttgagaccaggctggacaacatagcaagatcctatctctacaaaaaaaaaaaaaaaaaaaagattacccaggaatgatggcacacctgtagtcctagctacttagaaggctgaggcaggaggatcgcttgggtgcaagagtttgaggctgcggtaagcaatgattgcaccattgcagtccagcctgggtgacagacctatctcagtcaatacatacatacatacatacacacacacatacatatgacatgcagcaaattttctcccctccccaaagaaaaataaaaggtagtgcctgggagtaggagggctatgtcacctttccttggaacaaggttccgctaggaggcatgccataccttcagggtcctgggtaagatggagacatctgccatcctaccttttgcctgtggggcctggttcctccccagaatggaggcttggtctgcacagcctttcatggtccttagccttccacctgggccctgaactcctcttggtgggggccaagcctcattctcagtataggtacttagtgcctagtacagagcctggccccagtaggcaccagactgtgcacgtgcacatgtgagctgaactggacaccagagctcttgaactcacaggtgtgactgtgagaagaactcacacttggaaacatccacagctatgtcccaagggtgctgtcagagagctcttggcttcacgccatcacctggttctcagtgattgtctatcatctgcatgatcaggcagagcccggctggccagcagcttggcctagtgctgctccccaaccctggctgggcctcataaagacctgagtccctttgtgtaaagctgtggaaagagactcacttatttctttattcaattttaagtgtgcaaataacatacctattttccctttagaaaatcagagcagtgtgtagaaactaaaatcggcctgtaattccagcactttgggaggctgaggtgggaggatcccttgagccagcagttcgagtccagcctgggcaacatggcacaaccccatctctacaaaaaataaagaattagctgggcatggatggtgcatgcctttagtcccagtaacttgggagcctgaggtgagaggatcactcgagcctgtgaggccgaggctgcagtaagccatgatcgctcccctgtactccagcctgggtgacagagtgagaccctgtctcaaagaaaaaaaacagaaagaaaaagaaactaaaatcaccttggagcttctttttctactcatcgtatgttcttgagacttggctctcttgaactctctggaaggcgaattcattccatgtcattgctccttggtgttacacagaaggaataaacacattttagttaggctttcccttcttgctggaaaattgactcttcacagtctcttagcccacgcgtgtgagtgtttttcttgggaacataccaattgctaggtcatagaatgtgaaactttcggttttaataaataatgctaatttgtccttcaaaacggctatgctaatttattctcccactagcagcttttgagaaatgccagtttctctgcatcctcattatacctgatgttatcagacatgtttattcttgccaatcctatgggcagaagatggtattttgagttgtttcctgatttcccatgaggatggccgtgtgtgtgtgtgtgtgtgtgtgtgtgtgtgtgtgtgtgtgtgtgtgtggtgtgtgtgtgtgtttattggcaatccccattcctggctgcccccttcccctcatctgtgaatggcctatgcaaatccttcacgtttactactgtatctttggcctcttaaatcatagggataattgatctgatcattgtcttctgataattttcttaatagaatcctaagccccacccctgtagaattggagattcgatgggcagtgagatctggggatggtggatggatgaccaggcagtctcatgtcacctgtcagctgcactggcctctccttgccatggccactcctgagtgtcacgcagggaggctgccacataccacgacagagccgtctgccaccaagtccttcccatggtaccttagcactcagcatactcctgctggctcccaaatgcatgcatgaagcctgcaggcagaggctttagagggtgggccgagttggattccattcagcatttctctcctggatttctcctcaacccaagaccccatggcagtcccaaggtgactagcctgtgtcccccagggctccacagccagggtgtggagcagccgaggactggggcagggtacaggagttccctaaaatgatactggcgggacccacaaaggagtcacccaaaacccgcaattccttgatctcccttgcggatagcatttgcttgtaatctgtagaagccgcttcatttctccttaactgccccacagcctctgaaaagcgagagctccctccctgggatccttcctgtctcactggtgtggccgcattttagttttcttatgaaatctctcactgtgttctcacagggctttgatgtctcaattacatttctgaaagctgttccgttctggggttttatccttccttttttgttctttgtggtggaggtggcaggtctttcttccgctgaagcccctcaggcagccaggctctatgagggagtcgcactgcctgggacaaaccccattgacactgacgtgtatgactgtgtccgttttcccagatcaaactctcagatgaacttcttttgtgaatgtgaaaacagaaggtagtcaagttgtcctgtgtagagtgaggaaagggaaaggagaggagggggaaggaggatagaaagagaaagaaaggaaagaacatgtttattgtttttgttctatttttaaagagtattttttaaaagattcccactgagaaaatgctttaagttttgtttgtttgttttgagacagggctcatcactctgtcacccagaccggagttcagtggtgtgatcacggctctctatagcctcaacctccctgggctcaagtgatcctcctgcctcagcctcctgagtagctgggactacaggcacatgccactacagccagttgatttttctacttttagtagaggtgaggttttgccatgttgcacaggccggtgtggaactcctgggctcaagcgatccacccatctcagtcttcaaaagtgttgggattataggcatgagccaccacgcccggcctgttttaagtattgagtaaagaaaacaaaccctacctaccacaaagaaaatgtttataagaatgaatatgatgacttccttttttaataatgtagaagactagtcatctagagaatcatccagtatggaactaaaaattcatcataagataaacatactattgtacattttatgttaatataatatatttcataatatattaaaacatacatattataaatttttttaaagacaaggtctcactatgttgcccaggatgaactcttgggctcaagcaatcctcccaccttggcctcccatagtgctgagattacaggcatgagccaccgtgcccagccctaaaatatgttttttaaaaaatattttcaaatacccggctggactgttgggaaaggaaagaaggttcttgctgtagataataagaaagcacaactgggccagatgtggtagctcatgcctctaatcccagcactttgggaggtcaaggcaggcggatcacttgaggccaggagtttgagaccagcctggccaacatggtgaaaccctgtctctactaaaaataaaaaaaaaaaaatagccaggcgtggtggtgtttgcctataatcctagctattagggaggctgaggcaggaggatcacttgaacccaggaggcagaggttgcagtgagctgagattgtgccactgtactccagcctgtgcaacagagcaagagtgtctaaaagaaaaaaaaaaggtacaaattcagtaaagcctatctggagctgggatttgctgtgggggtacctggctgacttcgggggtcatgtgctggagagaatagagggaaacacgaggcctgtaaagaccgagaggaccaactgggtgacatccacacgaaaccagaatctcagacaggttacactgtcagaggattgaaccgaggcatatgttgctgggggttacccgagaaaggaaagagaaatttacctgtgcttttagatcaggatgaaaactgaaaaaggagaggggggaaatccttggagaatgcatgagcccagtttgttatcgtgtgctttggccaaaattgataccacccatgttacccttctcctcccctaataaagttgagccaaatatctggttaatgtgctcccaacagaacctattggggtgatggaagtattccacaactgggatgtggtaatacatagccataaatatactaaaactcagcactattcaaaatagtagactcatggagtcaacccaggtgcccatcaatggtggactgaatgaagaaaatgtagtacgtatacactatggaatactgtgtacagccataaaaaagaactaagtcatgtcctttgaagcaacatggatgcagctggcagcctaagtgaattaatgtgggaacagaaaaccaaataccgcatgttcttacttataagtgggagctcaacattggatactcatggacataaagatggcagcgatagacactgtgtactgccaaaggcaggggggtgacaggggttgaaaaactgttgggtactatgctcaaaaaaagaaaaaaattactaaaactcaaaccgtatacttaaaataggtaaactgtatacttaaaataggtgaactttatggcgtgtaaattatactttaataaaactatgaagaaacaacaaaacatctcacctaccctcttctaatcagaggcttctgttaatgttttggcacattttctctgtactagtatttctttgtagggatagttttttttaaaacatacaaaactcttggtaataacatttttatcatctttcatttaaaattataatgttttccacagtcattgcaattatttgtaaaacatgatttttaacttgggcttattatatgtgttcgaaagtatgtcttgaatacttttctcattttaaaataatgtcccagtagagtgggacatagaataaaaatgaaagttctccccttaatacttctcccacacacacacactcctacccccaattctcacttcgctcctcatgggtaaccactgtccacagtttggttaaacaatttttaaatgggtatataattttgcatctggtgggaaaaaattgcactcaaatagttctcctgtttggggacatttaggttgtttccggactgagctctcttgtttaaaacataagtggcagaggattgcatacagcggtagaccatagatctaatggtcctatgttaccctggtgatttccaagtcaagggtagacattaaattagacattgaatttggggataactttctttttcttttcttttctttttttttagacagggtctcgcttttgtcacctaggctacagtgcagtggtacactcatggctcactgcagcctctacctcctgggctcaagcagtcctcccgcatcagcctcctaagtagctgtgaggctaattttttttctgctttttgtagagacagggtctcactatgttgcccaggctggtcttgaactcctgggctcaagcattcctcccaccttggcctcccaaactgttgggattacaggcacaaaccactgcacccagctggggacaactttcaagtaagagaaggaacctagcatatgcagaggactcctatgcacaagaccccatgcttttcccgccttttctcatttaacgcaccaaacaattcaagataagggacgtaattctcattttacaaatgggaaaactggttctgaagggccaagtgctgtacacatccaatgcccatccatgtacaacatccagtgcagggcttggctttaaattgtcataccctgagttgagggcttggtgattctgtcatggctcaggggactcttgctttactgtctttacttaattaggtgaactcagtttaaccatcacaactgtaaactgccattagtctttaaagaagcactgaaatgttactgaggttcttggtttaagtaagttccatttgtctatttttggctttgttgcctgtgcctttgaggtcttagtcatacattctttgcatagaccaatgtccagagagttttccccagattttcttctaggatttttatagttctgggtcttacatttaagtctttaatctatcttgagttggtttttgtatacagtgagagagaggggtccagtttcattcttctgcatatggctgtccggttttctcagcaccatttattgaagatggtgttctttccccagcgtatgttcttatcagtttcattgaagatcacttgactgtaaatatgtggctttatttctgggctctctattctgttctgttggtccatgtgtttttctttttgttattttttgagacaaggtcttattctgtcacccaggctgaagtgctgtggtgcgatcttggctcactgcaacttcgcctctcaggttcaagcgattctccacctcagcctcccgagtagctgggactacaggcacacaccaccacgctcagctaattttttttattttttggtagagacagtgtttcaccatgttggccaagttggccttgtaagtcgtgacgtcaagtgatctgcccacctcggcctcccagagtgctggaattacaggcatgagccacagcacccagcctatatgtctatttttataccagtaccatgctgtgttggttattacagccttgtaatttgaagtcaggtagtgtgatgcttccagctttgctctttttttgtttgttttgagaccaggtctctgtcatccaggctggagtgcagtggcatgatcatggctcattgcagccttgaaccaccctgggctcaagccatcctcccacctgagcctcctgagtggctgagactacaggtgtgggccaccacactcaactaattttttgcattttttgtagagatggggttttgccttgttgcccaggctagtctccaactcctgagctgaagcgatcctccctcctcggactcccaaagtgctggaattacaggtgtgagccatcacacctggcctagctttgctctttttgctcaggtgtgctctggctctttgggctcttttttggtgccatatgaattttaggattttttttctaatactgtgaaaaatgatgttggtattttgataggaattgcattgaatgtgtagctcgccttgggtagcatggtcactttaacgatatcatttcttctgatccatgagcgttggatgtttctccatttgtttgtgtcatcttcagtttctttcttggattgctgattgttttgttgttttgttttgtgttgtgttgttttgttttgttttgttttgtttgagacggagttttgctcttattgcccaggttggagtgcagagcgcgatcttggctcactgcaacctccacctcccagatacaagcaattctcctgcctcagcctcctgagtagctgggattacaggtgcccaccaccacacccagctaatcttttgtagttttagtagagacaggatttcaccatgttggccagtctggtctcgaactcttcacctcaggtgatccacctgccttggcctcccaaagtgctgggattgcaggcgtgagccatggcacccagccatgctggttgtttttaagctacggcttgagcacctaacatgcagtaaacattggacagatgctttatgtactttatatgctttatatcagtcctaactagtagcagtttgagggagtgtgcattctctttattatccagatgagggatctgaggtccagagaggaaaagaaactttcccggcataactgtcagagaagggactcagacctaggtctgtgtgactctaggcctgggctctaaccactgagctctgctcctgatagaatgagagtcagctttggtgtctccatcaccctgggcagccagactgtgcctcattctcttctcaccttcctcctcccagataacagcgacttgattgcatgtacagtgatcaccaaggatggcggcatggtccagcgattcctggctgtggatatttaccagatgagtttggtggagcctgatgtgtccaggcttggctggggagtggtcaagtttgcaggcctattgcaggtaagatggccaggagctctgggatctgttcgcagttggctacaaacacacacacacacacacacacacaccacacacaattgtcatctttatcattaatttgtagtgatattatacaaggtatatgtgaacaaattgtcacccaaaaaaaagctaaaataccacataaatgcacagataagagcaaagtcctctttgaccaaaacgctcgattcttacacctcccctccaccagagataatcttcattatcagtgtgacctttccagatctgtttttctgccaaaggcatatataaatgtaactacatgtactatttttaaaaattatatacatatacttgagagtgtatgtgtgtgttttttatgatatcacattgaatatgttctaaactttgcttttgtcattcaatatcaatagtgtgtcttggagagccagccacattagtacacgcagacttcctggtattctttttcactgctttgtgactatagcaaggcatacttaacccatgccgtgtcggctatttccagttttctgctatttcagcagacggtgctgccatgaacagaatcactcttacttctttatgcacttgggcaaggtttccctaggcagataccaagaagctggggtgtactaattttaagtgttagtagacactgccaaataccactctaaaatgattgttgccactggcatttttgtgaattcccttccgctcaacgtcaccccagcagagctaggctctaacttgccaagtaccaagctggggcttgggttttggggattttttgggtttttttttgtttttaatgtttgccaacgtgggccagacgtggtggctcgtgtctgtaatcccagcactttgaggggccaagtcaggtggatcacttgaggtcaggagttcgagaccagcctggccaacatggtgaaaccccgtctctactaaaaatacaaaaattagccgggcatgatagcaggcacctgtaatcccagctacccaggaggctgaggcacgagaatcgcttgaacctaggaggcagaggatgcagtgagctgagatcgtgccactgcactccagcctgggcggcagagtgagaccctgtctcaaaaaaaaaaaaaaaaaaaaaaaaaaaagtttgtcaacgtgatagataactagtaccagctctttgagtgaataaagcaaagaatcagaagggttgaaagcagcctcccaggtcgcccctctgccataccccttgtccctggatgtccagctgacacttcaggcctgaactttgccctacttcaaggcagtccatttctttgccagccagccctggtttctggaagggccttgctcaggccgccccacctctgccttgccgcagcctgacctgctgtctgtgtcctgctctctgcgagaaccacccacatacttgaagctgctgttacagcctcttccccagcctcctcttcttcaggatctttctattgtaaaagtgtcttttacaaagtgtggtgtgagaaacaactatagaagaatctttcatttaaaagaaacactccatgtaagacattatccattaagtgacttatgcttatctatctaggctttatctaggcttatgattaatttcctttagaatttagtgtcaggcaagtgtttttctcccctgaagaattaatatgtgtcttccatcagacaatgaaagccacataaacctttttttttggccgtcttccaatgggtgctatttgtcaggtctttactataccagactccctgctttaaatgcagaatgcctcatctgatcttactgccgcgttttgatgggggtgttatctccaaagagcctgtgccaaatgtagtgcctgagaaccacaaccatcttcctctgtgagccttttccaatgttgtccccacctcctttaacatttctgacttttgtgttcattccctctcaggcttttatatcagatcacctcaaaccttcatgggagtagattgtctatgcagagtccgttctgaggttttagactggtttgtctttattatattttgctacatgttcatttattctccacctttgaaacacagtttccttcaaatctctgctcaatgaccttccctatccctttctttttttttttttttttttttttttgagatggagtctcattctgttgcccgggctggagtgcagtggttcgatctcggctcactgcaacctctgccttccgggttcaagcgattctcctgccttagcctcctgagtagctggaactacaagcgcacgccaccatgcttggctaatttttgtgtttttagtacagactgggtttcaccctcttggccaggctggtctcgaactcctgacctcgtgttccacccacttcggcctcccaaagtgctggaattataggcgtgagccaccgtgcccagcccctgtccctttctcaggattagcttttccctttggggaccagaagtttgtcaaagacatacaaatggttgccaacgatgtccccttcttagaagaaataaggaagaaattgatgagtagatgagcaactatatctgagatcatgccagatggtaatagtaattttggttcattatctctggcttctcagaagtaagagtttgcctgtggtgttacctgtggccccttgaagaggcttgtgggggtacgctgttattcatgagctgaccccagtcctcatggaaaacaggcaccagccaccaccaccagcatccgctcctttggggtactctgtgcctcctcccacactgtcctctcccactgggcctggtctgccttgtgcccatccatgactctgttggacttgggaggctgtcgatcttagatcaaaagcagagatgaatttggagacctctttctagatgcctcatgatgccacagctcctagccaccctcctcccaaacccaacgaatgccttttcctttgcttctcactgtgcaggacatgcaggtgactggcgtggaggacgacagccgtgccctgaacatcaccatccacaagcctgcgtccagcccccattccaagcccttccccatcctccaggccaccttcatcttctcagaccacatccgctgcatcatcgccaagcagcgcctggccaaaggccgcatccaggcaaggcgcatgaagatgcagagaatagctggtgagtggctggaccctggcagggcatcctctgagcacttggtgggtcagggctgtttgtagttctcacactgaccttgagaacccccatagcatagaagaagacacgtatgattcaggaattgttttatatacgaatacgaggaagttccatttcctgggtgtttggtttctggtgagtttctagggctgcatggaagagaagaggagctctccctagcaggcaggaggccagcaataagtagacgtcagtgtgggaccactcttctcagcccttcacactgaaattctcaagcatatgttaacaaagtgctttgacgttactctaccacctccgatccttaaaacaactctggagttctgtagggcctgctctgcccattttacggagaaggaaacaggctcagggacttgcccaaagtcacacaggcagaacccacaggcagaacttcctactgtaaacttaccccttcctccttccccttcccagttcttataagaggcagccctgcttggtgaaaggctggaacccttggaaggaagtcattttacatttcacggggattgcggtgaatttctgaggaagcccaacactgcccagtattaggaaggccaggatttattacaaggaaagtcacagaaatgagggagatgcgttcattgggcaggaaggcaaggccttctcctcggcgtggggggaaggcatgctgtcaactcctaaaatgacagtctttctcaagatacccagtgccattcagttcaggcaccagtgctcatcctggtggctgctgagaggattttaagcctacctggggatgtgggggtgctttctcaagggataactttaaaataagcccttgaccaggcacggtggttcatgtctgtaatctcagcacttcgggaggccaaggcgggtaactcacttgcgcccaggaattcgaggccagcctgggaaacatggcaagaccctgtctctacaaagaaattacaaaaatgagccaggcgtggtggcatacgcctgtagtcccagctattcgggaggctgaggcgggaggatcacttgagcctgggaggtggaggttacagtgagccatgattgcaccactgcactccatcttaggagacggggtgagaccctgtctcaaaataaaccctcagagggccagtttctgggcgttaccgatgcgatgatttactgtgctgatttgcacaggcccgcgtcccacgttgtcgtccccgtctcatttctcacttagctgaaacttggcctacaaaatcattactgaagcattctgtaatgtgcaaagtgacttaaatcattcagccctttcttttaagatttattttcagagagttttttttttttcttcatgtaaagcaatttctcacagctggcatgaaggccaaatacttcatttgaaaattgagaattatgctgtaaagtggctgttagaactaaagccttgggtatttcttaaattgattttaaaaagcccctccgtatggatatattgggaggtttatttatggaagggaggttagtggctgagacagataaacacccactcagagttacacatgtacatgcacatccatattttcgcatgctcctgcacgtgtgcggatatacatacacacgtatacgtgtgaactctctgggcagactcggccccactcgcttggggtctgaaacagcctttgtcagggtcctttacacatggaagctgagaatccaaagtggaaattgacccagcttccattccactcgaggagcccaggctcaaacccctttctccttggtctcaaccttggcccgaagccctcacttggcttccgcttgtgcgttgagcctcagtgggaactttgatgttccactggtctctgcagcttgaggctgcctgccgcccacttggcgtctcccaagtgatgtgcctggcagggccacagccactacgatgtccccccccccaaattctcaccacccccctctatcccacatgctcagagtgaaccatgctattgtttgaccgtagccctcctggacctcccaatccagcccaccactgaagtcctggggtttggactcggctcctccacctccactcagcacctgcctttccgcttctacgaccaggggcgccggggcagcagcgaccccacagtgcagcgctccgtgtttgcatcggtggacaaggtgccaggtgagccagccccccgccctgcgccacagctcgttcatcatggtgggcgttcaaggtctttctctctgtggagcctgtgtgagctgcccttcctctctcagaagccccgtcggctggcagcaccagcttcttagaatttgtcaaagcacagcgcaagattaaacacagcccccaaaataaattttggctttccctttagtgtttggtttggttttccagagatttgttgggtatgtggaagaacttctcagaattgactaagaattttcttggaaatttcttggaaacatttaaatgattagtgctgaagttgtgggagagtaatttccttctccatgtaagatgactagaaagagagagtgtgtttggttccggttacaaccccctgaagaagtgagacttcaaaagaaggccgtgctgcccacaggtcagctgtccactccttccatatgagggcgtctcctcccacttttgccacagctcatctctaaccctgctcctccgctcctcccaaaacagaaacttgaatggaaagtccattgctgatttgtcagagtggaaaggaccacttctccagaagaccgagttctccccttcctgttctgacatgtctgctttaagtaaatccgtatgcaccccgatccctcgaaagagagcctttcttttggttgcaaaagtttagagcgctggccaagctctccctcacaacttaacccctccccatatagggcttcaaacttaagttgcaagtgttgtgaaatgttttcaaaagcagttattgatttaagaacaaaacgcagccataggaacctgctcaaaacccgagtcctggttcccccatgtgatttattttagtttcattgtttgataattcattatttatatgtatataccgtaggcatatgattttttaaaatccagacaggagatgatcaaatgaaaaataagtctactttgcttcagaagtaactattgttaacagtttcttgcctgtctttccagaaatatttctttgtatgtcatgcatatgtttgttttttacacatggggtataccgtatgtctgatgctgcaccttgctacttcttccttaatagaaagtgtcacacattaacacgtataaatcaacctaattctccttaactgttacatggtattttgtcatatggatgggcaaaaaaatcttttttgctgtttcgtatttgggtcatttccagtgttttgctcttacagtgtcacagtgagcatccttagggtgtctttgtgtaattgtgcaaatttcgcatgtctgtgtgataaattcctagcagtgaatttgccaaaggggaaggtttttaatcttgatatatgtagtcccaacgtgaactctagaaaacagtacaccaattcactctgccacccacagcttgtgattggtttctttcttaaatccagtctcagggctgggcatggcggctcatgccagtaatcctagcactttgggaggctaagacaaggcggattgcttgagcccaggagtttgagaccagcctgggcaacacagtgagacatcgtgtctagtataaataaaaaattagccaggcatggtggtgggcacctgtggtctcagctacactcaggaggctgaggtgggagggtcacttgagcccaggaggttgacgctgcagtgagctatgattgtaccattgccctccagcctgggcaacagagtgagaccctgtctcaaaaagaaaagaaaaaaataatcttaggctgagagactgattgtggcaccgcctgttttcagtgatgaaatgtgagatgattctgcctgtttcagggtcaggaggattctttgcttaaaaaattctgcaggttgcttcgtgttctgtggctatgattgctaagtaaatataaagtgtgactgagtctaagttaactaagtacaaattgacctggtaagaaatgacttctttagggtcattgaggcgtctttcagtttcggaacttactggttaaagagaaaagcccaggccttatttctgctctgagcccttttggaacaaggtagaatgtaaataaatacatggagccaagcggcccattcttcagcatctacatgatcatttctctgtttgcagaatgctttaggatgacttattgcttacctcttctaccctgcctggccttccaccggtgggtgagaacatcaaatgccaggagtgtggcccggctccagaacctgggcctgcctgccggggtggttggcacagctgggatgccccatgtcctgttgctggtcccagggtcagcaagtgtgaggctgtgccaactgggacaacagcaagtcagaggtggctgctgaaggcagcatccaccccttggctgtgtctcccctgactgcccctggaagtgccactcagctatgaggagtgagatggagacattcttatttatcacaccacccccgcaaagagggaggcctcgctgccctcccaccttggcttggcaccagagctgtgtcctgaagagcaagttgaaatccctgagccttggcatggtgggagcataggctgcccccacccccatctcagtagtcagggtcccccacagcagcagccactcagcactttggaatcattcttaaaacttttcaccctgcttccacacccaccagcctgcttggcctccagaaaatactgagatccgagatctcctctcccagatctcccaagattgcaacagaagccttctcaggatccctagcttccattcagccagtgggatcattctagtacttaaatcagattacgtcatacccctgcctccagctttttggtagtttcctgttgcacttagaacaaaatccacatctctccttctgatcttgggtggtggctgtgagatccggccccaactggcctctcagatgaagttcccccaaccccaagctcactctagccccaaccccagccttgccagcccctgctgctcctctaagctagcatttctcagagttttagcctcagcacccacgtgtttatctgcttaaaaagtattacagaacttaaagagctttcatttagatagattatatttatagatatttatgacattagaaattaaaactaagaaatgctttcaatatatacttcttgaataaacccattgcatatatgcataactaacatagttttctatgaacaataactctgttttccaaaacatagaaaaaaattgatcttgcacatttctgcaagtctctttaatgcctggcttaatagaagacatctggattctcctctttgcttctgttttctgtctgttgtgatagcatgcattctgtggcctctggaaaactcctcagtacacccctgggaatatgaacataaaagaaaaatgtcttactatttttatgaaaacaaggatttccagaccacactttgagacccactcctgtaaatcactgtggccttccctgccccagggccttgcactggatgtctgtacccagatgttggtgtagctgcctcccgctaacggctcaggcttagtctgtgtgccgcctcttcagtggccttttcagatcagctcctggctagggttgtcccctcccgccactgcattggcctggttccttttttttttttttttttgagatggagtctctctctgtcgcccaggctggggtgcagtggcacagtcttggctcactgcaagctccgcctcccgggttcacaccattctcctgcctcagcctccctagtagctggtactacaggcgcccaccaccacgcccggttaattttttgtatttttagtagagatggggtttcaccgtgttagccaggatggtctcgatctcctgacattgtgatccgcctgtctcggcctcccaaagtgctgggattacaggcgtgagccaccgcacccagcctagcctggttccgtttatccacagcactgaggttccttacctggctgatgcctttgtgtgcctggtcatagtctttctcccctgcagagagggttgcctgcgtgggaaccttctgtgctgtttaccctgcatctcagcgcctagctctgtgcccccacttagtatcgttgagtgaagaatgagcctgcatttgttatctgctcagccttggaacagagcccatcaaaggccttctcccttctctgaacacgggaagacaaggaaagtccctctggggccctagatacttggtggtttagtccatggaactttgacaagggaacacaaaggaactgagaaccgagaagaccttaagcagcatccctcggctaaatttctgtcaccaagcgagcaagatgtgtgtccaaggaccatgtacccaggtgacagatttaggttggttgcatatcaactgaatttcaccaccctcctcctactcagagttttacagaagccacagagtagtgacacggggagccgggcagtggagggagattcggtcatcagaaacctggcccaggttggcctctgatactgtgacatgtcaccattgccatcaagggcccgtgggtgctggggcgtgaccacttcccaccctccacaatggtgcccctccccataggccgcacagcgcatggagtccttgcttctgcctagataataattcacaaggaagaaaacaactctggctgctgcctcggggtggctgccagacaagggtgttttattaggacacatcttccgattttatctgcgggcccaggtaattgtcatagagcagtttgtctcccctttagaagctataaacgattgtatttgatgaaaatatgcctttcatttccttggatgagatattaaagtagtgtataaatcagggctaataggtgactagccactttggtgtatttttcttcttccatttggctcagaaaaaaaaaatcacaagttctatttattggctggttttatgttgatggctctcaccctcacagaatgttcagcttcacgagggattgtgcgtgcgcctggccaaggaggggggtcagtggcggccagtatgtgggggtgggcaggcatggccaggcctagactctagcctgagcactctgtggctttgagtgccatgttgctgtggttagtgcctcatggacctggcccatggcaacagctgcttctagagatagaatctgtcatgatgggcagggtgtccaaaactcgcctgcaaggccaccctttccataaactccaagtggaccagcagaccccagagcagaagctgttccccagaaatgacccaggggtgtcaggggctacggcctcccagaacagccttgctcctcactctgggctcctactggcccagaggctgcttcaggaggccgcagggaaccagagctgcttacaggtgttaccctggtgggttggtgggtgtgggaagggctggcagagcacacagctcagaggagcagccaggcaggttgacatctcctggcccttgcagatgagggcttagtgacatgacaaaaaagtgacctgttcccacctggtttaccatcaaccgctccccaccagcctgttaactccgggacagggacttctctgcctcttctgctgctctctccttaaaacccaccagcccctcctgtcaccagcccctctctgtggcccatggtcccatgcagtctggcccctgccctcttctgggatcagctcccagccctctctcccctcggctctctgcagatgacacaatccagcccttcagccgcactggctggctggctgtgcctcaccagggccaagtgcgtcccatttcagggcctctgttttcgtgcttccctccgcctggagccctctgcatggctggttccttctcagcactcagggctctgctccgatacctcaaaaaggggccttccctgagtgcccaggtcaccctagttctctgcacggcagcttgtttttaattgaggtgaaatttaacacaacataaaactaaccacttgaaagtgaacaattcagtggcatttagaaccttcccaagattgtgccatcatcctctcctctagttccaaaacatttccatcccctcaaaagaaaaccccatagccattaagtagtcatcgcccacccaccccccccgcccccgcccccatccagcccctggcatccactaatctgctttctgtctctatagatttacgtagtctgggtatttcatatcaatcatacaatccatggcctttcatgcctggcttctttcagtttgcatcatgttttcaaggtgcatctatccttcttttagctgaataatatgcattatatggatagacgttgttttgcttccaccttcatccatcaatgcacatttgggctgtgtctgccttttggctattgttgaatgggttgctgcgaacattcgtgcacaagcttttgtttgaacgcctgttttgttttcagttatttctggtatatacctaggagtaaaaagtaggtcatgtgacaatctaactttctgaggaattgccagaccgttttcccatggtcttcatagtccttagctttagctgaaattgcctcttgtattccttgttctctgacactatcctgcactagaatggaaggcacttggccagggggtgggtacagggttgtggggaacctcgtttgtcttgtccttgacagtgctcatggatgcctatgaagtagttgctcagtgaataccgatgtgtgggcggatggatgcattggtggatgggaggctgggggacagaggatggggctggaggaattgttcagtcttgttttcccaacagactgtaaacccctaaggccagggtatttctgtcttattcaggtctggtaccctgtgccagttggtggtggtttgggtgtgagctggcaagttggacttcatcccttaagggctaagctggactttattcacttcctgtcccagcttcctactgggtttggggctccagctgtcttgtggtagatatttaactcccctgtatcacctgaggtcaggagttcgagaccagcctggccgacatggcgaaacctcgtctctactaaaagtacaaaaattatcccagtgtggtggcgggcacctgtagtcccagctactcgggaggctgaggcaggagaatcacttgaacccgggaggtggaggttgcagtgagctgagatcttgccattgcactctagcctgggtgacagagtgagactctgtctcaaaaaaaaaaaaaaattttttttttgactctcctgagtatctgggccatgccttgcttttcaccggtgttatctttatcaaaggcacctaaaccggcagggtcagtcacgtgacccagagcacttaatagttccgtggaaaagcctcgccggttccagaggcagcccttggcagctgagtaacttaggaagaatgcagaaatgacagtgtgctatgagccagctgagctgaccgcaaagcctctgaccgccatccaaaaaggcaaaaagaaaattgatgtttcattcatagacatcagttcagacctcccctgagaataacgtcctaggtgctaatgtcatctcatggtggcattttccaggaactaattttttagtcctcttatttttcttgtttctgattataaaactggagccagttctctccttgtagctccccaaggcaaaaaataccctttctggagtcacacaggaagaaggacctggggcttcctccagcttctccagcccggtcttaaccctttcccagccttcagctcactgcttagagacttgggccagcaggttagtgaggcgggtccgtgagttatggaaatttgattcctaccctcaggccttttataaagcaaaatttattgagctgctaagcactttatgcattattcttgttcgagcttcccaatagccctcagaaggaagatgttaccattttccctttcggcaggtcagaaagtggcctacccaaggtcacaccagataccctccctccagcgtcagaccctgagtcccaccaccatgctgaaccaacttttaattcatagctaatgtgaattccccttttctgattttttttttttttttttttttgaaagaagggcctaacagcagccacctaaggcctcactggtaccaggcaaaactacgttgtcggctccaactctaagcatattttagacagaaaaatttgtatctatttctggaagtgtgagctataatttggaagaattaaccatgttgggcactttatatgcacgaattctatcctcccgaccaccctggaagctggtatcacttgctctgcctcacagataggaaactgaggctcaaagcaagactgcagagctcacatgagataggctgagatctgtacctccccttcctgcctctaaatcccatttgcttcaaggctggcattggtgcaggttgaatattccttatccaagatgcttgggaccatgagtgttttgaattttggatttgggggaattttggaatatttgcattatacttacttactggtttagcttcactaatctaaaaatccgaaatctgaaatgctccgatgtgtgtttcctttgagtgtcatgtcgacactcaaaaagttttggattttggattttcagatttggattgctcaacctgcaatgactgagctacttcgcatggcagctctgcctgtctcagaatgtcagagatcagtaggataggccctccttagagaggggcctcaagggatgcccctggtctagacagaatgttccctactcccctcttccgtcatccaccctggcataggcccacatcctcgtgccccaagacccacttccagtgtttcaaggacaaacctgcaaagcagcaatccagaaagatgctccgtcctgagaccaccacttccaaaccaggctagcggtgcagggctcgttcctgcacaggtttgtccctggtgtgcatgaacaaaaagcagaaggatgacttcaaaatcctgcctgaacaaaagcagcaggatttgagcccctttcaaagctttctggcaattgcctctaagagatcagccttcaagtggtggggcaggggtgtggggaacagatcctactcaaaaatcagccctgagctgagtccaaggggtctcctgtttgccaagcctcttttcagggctccagagcagctgtggagagagagagcctcagggaatctggagctgggctcacacagccagagaaggaaccgcgttcccggatccgggcctgcaaggtttccccactcacaacatgccccccaaagacactttcccaatagacacagtagcacttgtcatggggagccctctctcgctaaatatggacacagtaggcagggccagccatcttgcccagatgcttttctgggaggtggagggaggggaagaagagagttccaaagaactgagtgttgcttcactctttggggtcattacctaactcatactgccaaagcgactgtatgcccgggagccttctggtcataagagtgtgtcagatggcagggaacactccctggttgctaatagagaagcccgtgcagtaggtggggggagagaacaaaccccatatgcaatctgccatttgacctgggccatgccttagaatgttctgtaggctcgggtgggcccgcagcagggcagccatgccggcagcacagcacaggccagtgtcagtggcagagcgggtggcttggccacacaccccgtgtgctcaccagcacgggcctggccccacacgtaggatagagctctccagcctcatcctccagcctcctagtcaagcacatctagtgcataacagaaaagactggaagacaccaagaaaagatcgaacttaccaaatcttcccaccccagggtgtccatgatcaatcccagcatcctttttttcattgtttttcctgttcattcacaatggggtttcttttcccagcagcagagtatttgcccaggtgagaagcagcagaatgaaagcacccagcacaagccaaagagtatgggcccaagtcccagccttccacctccacgggaaaattgttaggtggccttgacccatttggttcaccttgttggatctcagtttattcatataagaaacagggatgatgctcgacaatgtgagtggacttaagaactgaactgtactcttactaatggctcagatggtagattctgttatgtgtaccacaaccgaaaaacaaaaaatgggatacaagtgtcacctcattaggctcttgtgacataaaatgagttcattcacctaagtgcccagaacaatgcctgacccatataaaacgtgcagcaaaggttaactgctcttgccattttgttgttgttgttgttgttgttgttgttagttaagggctgagccttgggaccccagaaaataggttccttttctacacattaatcaattagcacgaacaaaattacgaatgcagtagtccttctgctgtcaattacaaagacatgctgcagtggcacagagttgctctttcacaaagactttccctgggcgttggtaaaacaccggggtgtaatagagcaggcagaattttcctcctcacacagaagagatcctgtaatctgcctgaggccccacagctctcagaggctgagccagggctggagaagagcacaaattgggcctccagcccagcacacatcctgtcccctggggtgctgactgccatcattggcactgcgcccatctgagccaggcagtcccccggagcctcacaacagctctgggaagctagtgtcattcctcagtgcccagtgttaccagctcacaagtggccagccagggctccctggtttccactccgtgaaccgccatgccctccgttctgaagcatattcagaggcagaacacctggaaatcaggtgagctttgggaaccccacatattcttgctgtattctactccatcgtgtgaaccaagagtacagaagtcatcagagagcatgacttgcatctgtgtctcaagtctgtatctaaaggaaaagtccataaaatcacccaaggaaacatcctaagccttttctgttggtgttttttttctttgcttctgaatcatttgttttatcaaccgcaagttctcattaacagacaagtgataggagatgccaaggtgtgaaggcccctttatggcagaaaaccgagaaacgaaaaattcctagcccttaattctgtatgtaagttgataaaagtccatcttgatttgatttttgccttaaaatctctctgactagctcaaagacaatcccctggaacaaggtttgggaaccacttcccaagaattagagtgcctttgggatccaagaaaatgaaatgccagctgggcgcggtggctcacacctttaatcccagcactttgggaggccgaggcgagtggatcacctgaggtcaggagttccagactagctgggtgacagagcgagactccatctaaaaaaaaaaaaaaaaaaaaaaaagtgaaatgccaacatggtgaaatcccatctctactaaaaatacaaaaagtagccgggcgtggtggtgtgtgcctgtagtcccagctactcaggaggctgaggcaggagaattgcttggacctggcaggtggaggttgcagtgaaccaaggtcgcaccactgcactccagcctgggtaacagagcgagactccctctcaaaaaaaagggaaatgcaaataagcagtattgccgagtgcacagttggtgggaaggagagttagttcgtgaggacccactaagaatgggaaaaaccaactgaatcaaaaggcagagatgcagcaataatggtgcctcagagacaggcagaagccatttgattttccacgtggccgtttccttcatgctgctgatggcctcttcaaagcacggcagctcctgggggccagggtacgggaccgcctggtggagaagaattggggtagggaaagaattggcattttttaaaggaacttttacaattccaaggaagtgacatgacaaacatgttgacgagggtcaggaaaaggaaggttggctgagcaagcgtttactaaggcccttgatgaatcaaataaacactgcacagggcttacagagaagcctggggtcagggggagggactgtgagcaagtcttgccagctagtgggctctgtggtgcttctggcttggcacatgcaaaggtgtggctgcagggtagggatgaacagagagctgggaagctcagcagggcccgatagcaaagcgctttgtgagcttgccccatggttcgaattttatcctagaagcagcaggaagccattgaaggttctaagacagatcaggggacatgggtggcaaaatggacttgggttttaactgactggagttgggaagggcagaggagaagggtggagtgggaaggccacaagacacattctggccccttcactgcatgctcacagctgtgcgtcaggtgatgcccgtgggcggatgagaaaagtcccacaggctggggtgcggccttccttacctttctctggccatttgccacttacttgtactataggattatattgcttgtttcaaaaaacctaaatgaccactgttttcactcaacagcgtatcctggagtgtttttcattttagttcgcaggcgcaccctcattcgattttgactgctgcgatcatctggtcaaaccactgttcattgagccagtcccctactgatggatgtttaggtggtggccaattttttgtcctttaacaaataggcatctccaagtgcccttgcgcaagggtttcctcagggtaaataaccatgaagtgaaaacagaaatagctacgctgagaaactaacaggatttggtgaccaatttgactgagggagtgggaagccacagagctagcttaaggcaaaatcttaagaaggcttggtttccctccccgaatgttctctgtgcatttagctagcaagggcatctcgatgatcccaacttctgacccaacagtccttgtgtgtcttgtgggtcttgttctgtccagaaggccttcgggagttgtggtgactagaagggtccccaggaactggtgggggtctccggggtggcccactcatagcttggcttgtcatctcagacagaacctccaagcttggcatgatggagacaccagtgggttctgttcccacctcctggcacctctgctgaggttacagctttctacacttcttttctctctataaccagaatcccatgactaaaatacagttttctttatttgcagctgtccagccatggcatttagtataaatatgcttttctccaaaaacacacacagtattattttttttaacatctcaaattcccaaagggccaaaagtcaatattatcccagtgtgataggaatggctgttttgcaacatctcttcacacttacacagcctgcttgctgaagcctcagagtaatcacaaaaacacattccaaaacccatcagcctggctgctggattgttttactgtctctgtcactccctgctgtgagctcagtccttgaaagtcgccgcctcagtttccatgttgagggtgagaaattcacagcgtgatttggggagcagatgcttcaactgtatgaactgcaaagtttggactgtgaagtgcagtgactcctctgaaaatatttgctagctggtaaaattcaggctcatggcatatgtggtctacttctagccttacagacttatttaaggtcccaggataaaaatcctatttattgaatgccaactatgtgctaggcactgggctaggtgctttacacaaaataaggagataagtatgtaaatactgtataaagttattagtcctacttttatagctggggcaagcaagagtcagaaagcaaggtcccctgcccggagtctcaaagttcatccctggagagggtgcctgcttcttctacctcttctaccggcttcctgagaacaaaagttatctcttgtcctttgttctttctcttcctgctaagttgatttgaaggctctgcagagcttctggggtaacctacgtgcccctttgttgtggctttctgagcacgatgacctcaccggcccacagctgggtctccggtgctgggttccaggcacactccagcctcctggctcacggatgtcctgttgaacctcacggatggctgggtggcaggaagagtcagtgtggatggaatgagccttcctcaaaaacccccaccaccgctcttagtaacccggaaaatgctctgaaatagttgacatttacaaagtcttgggcatttggggagaaaaacgttctttttttggccagatttccagcatgaagcccaagggaaatgtccacgggctcagcacagtggtctagcatctcaaagcagtgcttggcctggtggaggccatggctttcccatcctgccctctctccacatccagcaaagaacaaatgcagaatctggcctgtcctcctgtccccaccatgtcccacagagtggccctttgtgctgacccaacacgaagcacctgaaaggcttgctcaagctgccggacttgagcagcttgaaagccaccatcatcagtgcacctgctgtgcccaggtgtaagccattgtgttgtttaaactgtgccacagccctgccgaggaagccattgcaatcaagaggctagggccacacaccctggagccagaccccccaggttcaaatccacacctacccctagacaactatgtgatgtcaggaagttctgtgaagctcctgagcctctgtgtccccttctttcaaatggggctgatgataggacctgcctcacacagcaggagcttagctgggccagcattttacatgtgagtgcttcacgttatcgtagtgtcataatggccactgctgttgaggagggagccagggctcagacggatagagctgcctgcccaaggtcgcaagctcaggggtggcaagccagcactcccagcttcatggccctggctggagtcacttgcagagcagttggcctggctcctccaggcttttccgtagggtcctcccaagtattctagccagtgcttttgggctctgccagccatatggacagcaccaggcaggtagagttctgagcacctgccctgttggagccaccatggaagtcaccatctctggcatggttccttcttccagccagtgcacaccaagtgcctcctgcaacccgtcctaggcccccgtgcagaggacagctcactcacaggaggcagacatggaaaaggatgaccatggggccagggggatacctgaagtggtgggggcctcaacagggcaagtcacccagagggttcatgccgccagagcacggggtgtggggggcactgggttgtcggggaccgtgggggatctggaggggtgcaaggagacatgtgagtttcattctgcgtgctctgggtggcctcggggccgcgaagcagggaagtggctggacctgacgcatgtctgtccaagctccttgcacgtaccgtgtgggaagtggattggagacagcagtgcggggccactggggtcccaccagaaaccagggcagctgggtgagggacggtatgggatgtgggaggtgcccttggctagcatggtcagtgatggcggtggggacagcgtgcctggttatgacagatctgctcctgagaacggcgctgcctctgcacatcgtgtagcagcttgggacaggcaaagcatttcccatttgtgatctcagtaaccgcagagcgtagtgaggtgggagaggcttgagaggtgagctgaccagcgcaggtcacacaacaggaagcagtagtgtgctttgcacttggcccccacactgtcctgaggttgaaaggtttaaatgactcgggcactggggatgtctgacagagcattctgtgagactcatcgagctgccagcactgggctaagtatctccacagcccaggttcacagcagggaggcaggtatggttactctccctacttaccgggggaggaggctgaggcccagagaggtgaggtaacttgcccgaagtcactcagtggtaggtggtgttgctgaaacccactgctaggccatcggacccccacagtctgctcagtccagtgtccagggatcctcctcagggcccgggaacctgacaaaattcttggccttgccctgggggagctgtagttggaagctgggggcactgtgatcatacttgcagcctcacatgcgtggctcctgggcacgcctgtcagagcgctgtgatcaagcaggcctggaggtgcctgtgcttggcccttggcactaagcagctgtctaggcttcatgagccgagtggcatttgcccgataggtgtgatgtgtcaacagctttttctcctgcttttcacagccccggctggctctgagctagaactcttttaaaaatcataataaggcactgacctgcagtggtacacactggtgcagcccaggcacaggagcctctgcagtggagatttaaggtctgctggtcaggagcaaatttagaatctttctggaaggttctgggtctggccaagagtgtagttaagcccttcagtgatgtgagtttgggacttctttagcttattgtcttcatggatctacagaggtaggcttctgaggaaagcagtggcttgtctttttattcattcctttttccagtaaacttttttatttttttggagacagagtcttgctctatcacccaggctggagtgcagtggcacaatctcagctcactgcaacctccgcccccctggttcaagtgattctcctgcctcagccttccaagtagctgagattacaggcgcctgccaccacgcctagctaatttttgtatttttagtagaaatggagtttcaccatgttggccaggctggtctcgaacttctgacttcaggtgatccacccggccttggcctcccaaagtgcagggattacaggcatgacccactgtgcccggcctatccagtaaacatttattgagcacctactgtgtgccacgccctgtgcttggggttggtgacctggtgagcttgcagtcttgtgagagtgacagacagcattcaactaataacacccattactaatgcatttataatacagagcctggctggtctagtagggatggggaagacatctttgagcaggtgagtgggcagatatcatgccagtcctcgattgacctcagtagggatggcaccaggttccagaggctgaagaagagacctggtgccagcaaatgagacatagggttcatcaaggacttaatgtacagggtcagtccagtggcagcaggctgggtgggaaagccacagccgcttgtaaaaaccatgccacttatatagcagtttcccttagcaccctccccctagcaacctctacctggcaaccttcatttaacctaaaacaaagggcttaagtgaagctactgctgtcagctgcatctgccgtccagcagatcgtgggagtgttcctcagagcagacaggatagggaatagcatgtgcaggggcgcccagggtgagagcagagtaggctcccctgggtccccatcgatgtgacaccttctgcacttgaagctgttaaaggcatcttccattcatgcattagctcatcgtcagaacctccctggggaaaggtaggcatatgttcattttgcagttgaggttttctgaggctcagggtggttaagtaacttacctggagttgcacagctagtgcacagcaaagccagtgtcctatcctggcttggcctgaccctggcctcctgctctgtgttctcattttttattcttattccctatcctgtgttgttactgataaggctcagaggcctgccagaaggatcagaaccccataattatcaagcccattggaggataattctaagtcattgaccttaaatctgcaaacccagaaccttgccttgagagtgcctcctagccctgtcgctcggcactttctcagaatactactaggctggtcatctcccaagctaccttatccaccttagagtgaatacatctctgaaacttggtagggaactgcacccaaatgagcaaatcatgctatcccaggagagcaaggagctgagtgaacatccatcctcttggggcgtccctgcagcctgcagctggacagcggcctcagtctcctgttgccaggggtgacgaggcctgctcagctcagcatagcccttgggtcagctctttgctcctccaggcagacagctgtgttcattctccgtcctgtacctccacaacttctgtgggacagccaactagatgatcaggaagccactcaactggaacctcacaatggcaaagaaaagccaccctcccctcagctgagagggacctacaggcagccctaacagtgcctaggtgcccagaggcatggttcttttggaagtacggagccctcatgcctgtaggatcttccccagcttgaggcccacgcctgagccaggccagccctgtggtcctcggccctagctgtgcatttttaaaatcaccttgaaagcttttagaaaagcccaacatccaggcctaacccagttaagtcacagtgaagagagggccgttggtgacattctcttctgtaggagcagtggctctagcgtgcttggggtaggagggattctgggtataggagtgggatgttttgtgcgctggggccagtttcaggagaggccaattccacaaagcttgtcatgccttgggggacggctgtgctaagaactgggaaatgggttctggatggccctgccctcatggagttcatggtgtcctggggctaactcacttttgtaccagacctagagcagggaaggctctggaaggaagtcttaaaggatgagctaggtttcacgtggtgcatcccggcagggggaatgagcgggctgtgaaaaccaccatgtgcacatgggtcctgcaggcagcctgaggataggggtcagcaggagataaagccacgtgggaatggcccctgctcccgattacctgtcctggacttggttggagggcccagggaatagctgatgggcttcaagcagagggcgaaggtcccactctactccgaccacacacagcccttggagcgggaaaacagtcactgatggggccggccttagggcgggctacccgtggggcccgatgacccacacttagctggaaggaagaggcagccaacaacacttccttgagtcacacagctggagcccaaatccacccattagtccaggaccaaagccaatgtcatccgcggcctctcccactcctgcatccagtccctccccaagcctgtcagctctacctgggagatgcagtcatgacaaggacctctcaccaccacacctgtctcctgggcaaagggctgggtaacttctttaagcagcagagagtcaggcttttagggccatatggtctctgtcgcaacaagcctctcccattgcagccaaagcagctgtagagcatacgttaccaagtgggtggggctgtgcccccatcagtcttccctggcaggacagcaggtggctggatttggcccgcagggcattgtgtgctgactcctgaccttggccaagcctgggccagtggctttaaactcagccccactgttgctctccttgccctctatggtccattcttagcaccaaagatcctttcagggtgtgagtcgggtcaagtgtctcctctacttagattcttcgctggctcccatcactcagatgaaagccaaagtcctcacggtagccccacgttttacacagtttggtccctctgcacttcctgacactaacctcacccccgccatggtccccttggcccacttcaaggcaacttaaggggcctctccgcagccttgaccttgctaggtatgctcctatttggagggccctgacctgggtggcctctgtttggagaagtcgccctgggtacctatgtggctctgtccttgcttccttcagatcattcttcagacctcaccatctcagaaggtcttgccagatattctatatagtggcaaccctgtccccactcccagcactccaggggtctctaccttgctcattccttcagagcactcaacctctcctgacattttctactccttgactggccctgccctgtcccatcccattatcaaactgtaagctccaggaaaacaggcactgtgttttgtttacagctgaatttccaagtcctgggctataccagacatataggtagtgcttggtaagtactggataaatggatcgatggatggatatttggatatagagggatgaatgaataaatagatgaatatagaggatggataaatgggtaaaggggtagatggatgaatggatgtagagggagggagggagggatgggtgtagaaggatggatgggtatagaaggatggaggtggagggagaggggatggatggatgtagagggattgatggatgggtagagagggatggatgggtaggtggattgattggtgtacagggatagatagaagcctggatagatagatggactggcagatgggtaaatgggtaggtggctgctgggtggatagatggatagaggtgcaggaatggatgggtggatggccggatgggagggagggagggagagagggatggatggatggtggagccaacagatctttaatccccccttctgtgtgctaaacattgttcactggggactcaggggttagtcaaacaaaacacatcagcccctttggagctcatgggcactgtggacaccttagatagtctagaacttcccaccatgtttggtgccctcagggaactggcagatgctgagttaatgtccagtaaggggatctgacccagaccaggtgtctgggaaggcttctctgaggaaaggatgttgacctgggaggaggaggtagaggaagagcgccgagaaccttgtgtcccagacaggggctgccatagacaggagagcattgatgtctcagcccacaggctgcccaatccccaaggaatgaatatgttgctgcccgtttgacacctggcaacagtttggctaggcacagaattcccctttgtcatcaatttccgccctggccagataaggggagctgagaccccagtcctgtatcccaggtagatattcagcccagcatgccctgccgtggccctgactactcgcatcattagtacaaaaggaggaatttgacctgggatattttcctgtaatgaattctttggaaagggaaagttcttggacttgggcctgatttgaagatgaaatgttttgagccacgtgcaagagaatggccgacagaacctggagggcaaggttctctgaaggcgaggttccaggttgttctgcagagcagggttaggagtaaagtgtttgtaatcccctgctgcaagctctactcagaacttcttaggtaggggatgaaaatgttctaaattgattgtggaggtggttgcacaactctatgaatacacttaaagtccatgaattgtacactttaaatggattcattgtacagtatgtgaattctatctcaatgaaactgttgtattaaaaaatacagctctcaacttgtcagactgtcacaaagctgtcatccgacagcacataaagaccagattatctcatttgtgtcccattttgatcataaaatagttcaatgtatgtaacattttccttaaagcagtccaaatgtaaaaaaagaagttggaacctgcaacacattccggaataatttggaaaccttgatgcaatccagactcacctggcaccctttctcttccctaaaacgtgccttttttccatttctttttgactttgagaaaaaaactctgttcttactggtaaaatagcctcctgtttccttttctttcctgtaaattatgagataagtttgcatttcatacctttccagaaatctctgttgattgtggtctgacctcagattcatgatttctgggaaagaaagaattagaatcactgctgtgaacattagaagtgcggtgagtagttcgtgttgtggatttgagatggaaaacaggtgaccagtacctgtttgttgttccggaacttatttcctggtgctgctagatggtatgccggcaaccacgtccaactcatgccaatgacttttaaaaatgtcatctcaaatgccacatgttatgtcttggatgtagttagggctagttgtggcctttttgtatggtagaaacctccacctcctggtggaggaggtctggaggcactagaacttgacaatacaggtactgtttattgagcaattactgcatatcagacactgtgccaagcaaggttgtgtgtactcttctcacttaatcctcacaatgatgtatgacatagggattatttcccccatattatgccagggaaatggaggctcaaggctacaatttccattacacagccagtcagcatcagggctgtggcttgaacccatgtctgtctgccaccaaagcccaccctcttagcttatattatgcgcctccgtttccctgtccatactccagcctttagactcccaggccagtgctccatcccctgtatggccaggaaagcacagccatcttgtaggaccaggagcagttcaaataatgagccaacggctggcaccctttctccgagcacagcgatgcaccagaatgctctccctcctgtgacaggtgatgtgcgcttcagctcaggcccagaagagccacaaaagagaagctccagcagttctgtgtaggaggcaggatgtacttctatccatagaagggctctcatgattatttattaattatgaaagggaagaaaaaactaatagagtttcccagaaagggataaaagttcaatatgataaactcccaaaaagcaatcaaaggccaaagagggcagaaaaataaaggacagggagaaagagagatggtgaatcaaagtggccagtatgttagcagaggccaggggaggggccaggcttcacagccagggaggtgtggggctgtcggagcacaagtcaccagtggtggtgagtcaggcaggcagcgggacttgaccccatggggtcactgaggccctggggatgagctgataacaggaatggatggaaccggtcagctgttttgctattactgcagacccgttgtattaatttttgtgcattaatacatgaacgtagaatattataaatgaaaactgagaagctacaggaagaagaaatcacaatcctatcaacccagaagaaagcattgttaatatttctgtttattttccacttctgtcttccctgttttgtctctttctctcatttaaaaaaaaaaatacatgagttgattgttgatttttgaaaaaatcaggctgggcacagtggctcatgcctgtaatctcaacactttgggaggctgaggcaggcagattgcctgagctcaagagttcaagaccagcctgagcaacatggcaaaaccccatctccactaaaaatataaatagccgggcatgatggtgcccaccggtaatcccagctacttgggaagctgagacatgagaatggcttgaacctgggaggcagaggttgcagtgagccaagatcacaccagttcactccagcctgggtgacaaagtgagactgtcttaaaaaaaaaaaaaaattgcaacattgcaggtgcgacttaagaccccatcagttaccacccttcctcagtcatcatttgccttatttttatttttccagacccttctctgtgcagttgcatttcatacatgtgccagagctgatgaacagaacagagccaccaccccttctctgcaattctgaaacccaaacagctctgaaaatcaaaatatttttcctaactcgtatgatggcaaaaccaaaacctgccttcaggtatttatgggcgggtttattagagtcattgatgccagtaattgtgagtttatgttttcgtttctgcaaaaattcagtgtttggttttagctgctcacgacccagctgacagtgtaacgtaatacctatgtgtgccctacatggccttttacctcctaaagattctaaattccaagacatatctggccacagaggtttaggataaggagttaagtatggatctgtaattgtgttaaggtttgggcttcccttaaataaaatcataattctgtataccctgctgcaccttgctcttttcagacaccactgtaaatcaggaatctgtgttagcacttacagatttcacacattccttttcacggctgcatagtattccaaagcttggctacttgcgtttctttggctgagtgattcagtcatcctagtctttttctatcccgggcagcgttgcagtgggcatccttgggcacacctctctctgtgtgcacgtgcagtacaagaagcagaactgccaagtcacaaggttttgttttcacaacattgccatcatgtcagaagcacttccctgtactgtaaaatgcctcttctaaacttcattcttgatgactgcataatagtccattgtctgagtgttagtttcctgaggtggccataacaaagtcccacaaactgggtggcataaacagcagaaattgattgtctcacaggtctggagggtagaagtgcaaaatcaaggtattggcagggctggtttcctctcaggggtgtgaggaggactctggtccaggcctccctccttggcttctggtgttttgctggcaatctttgctactttttggctcatagaagtatcaccccagtcttgccttcatcttcacgtgatgttctacctgtgtgaaaatctgcgtccaaattttcattttttaggaggcacagacatattggattaggaccaaacctaatgacctcattttaactaattgcatctgtaaaatgaccccatttccaaacgaggtcacattctgagtctgaggtactagaggttaggacttcaacctaagaatttgaaggggacacagtgaaacacaaaacagtctgaatttgccagattttacttaatccgcttatactggccacttacgttgtttctactaccttatgaagcaccctatgacaaacatccttattcagaaatcttggtctacatttccaattattcctccagaaaccattccttagagtcagggggactgtccatttgtcaggctctgggtggcaccttgccaaattgccttccagaaagcagagtagggggatgcccacctggtcacacctgggcccttgtcttcattcacctgggctctcagatgactcctgcccagtgctccaggctgaagtcctctgcacatatgtgtgcgcctctgccagcatgtgcacaggcattgtttctatcaagtcacttttttatttctcattcctgccaaaaagagagagagtctacgggttaatagcaaagtagaaaccgtagctcaaaatgtctgtttggggcatgtactcttgcatctatatagatgaatagagatttcagaaatactgggccctctgggcctcaggcattaaatcaatcagtgcaatttcactcacagggcagcttgccaagggagcccaggagagagtagcgacttctctgatttagttcagtccgttaagctcatggcagcctgcaccagctcactgttgcaaaaggcaatcaagtaatgagtactcagccactttcggggggcgggggccggctggggaaggggctctctggagcctttcaaatggagccaacttttgatagctttttagggtagttctgagagctggagacgggtgaggaacccgggaagtgagagcttaattaacggaactacagagaatgaggcagcaaaggaatctctcagagaaccagggggttttgtgtgtgtgatgagcaaaaggatagaactaggtgcttgagtactgccggctaggaaccagcattgaacagcagatgcctaactcagcacagcaagggccagcttagcacagagaccagagagcaagatgcgcggaaggataaatttagcctgcatttcaggggaaaacatcgatctcaaatgtagtgctgtcttttaaaagaaagtggaagccttaggccggtcatctgggacaatttcacttgaacagctaaaagcccaggaaaaacgagtgctcataaccagctcatgctgctagcacacccacaagatcttccctctgcaggcgggcggctggtgtctgcatgggtctgacagatggtcctcctgctacccttatctgttcccaggaaaaggtgctgccttgttttctggagagatttggggtttctatttctgatcccaaatgttcatcttcatgaggaatgacggggggcccaagctctgtgtttgctcagctgctggtccaggacattgacatctggtgggttgcacctgtcagagcagggccagtgccaatcccctctgttgtctagaagctgagcaaaagacatcagttactggtgtctgtagatagggttgttttgtttgtttttaaccaggtcccctgtagcattcacacagcatcctgagcattgtttctacctggtcaaagctaagggcaccactgtggtcccaaataatagagcacctgtcctaatgacgttcccacaatctcgccagtcaggtggtgacggcatctttcctccagcctccctctgacactgctcccctgtgtcaaaggggaagaaagtccagtctgtcaatatttggggcactaatcatctgcgttcgggcgccaggggtcattgaaaggctgagacgcttccaggaattcatggctctaaaaccgtggggctgactggaaaggatctccagcgagggtatgaagaaagaaacccaaatctccactccaccccgaccccgcagcctctgagcattgtccattgtgtcttgggttcttgggaagaaatgaagtcaatgcacatagtgatgtgggcccaagttaataataaatgtagaggaaggagaaaggatgttcaatatttaaacatttcagagcgctgtgtttgtttgccagttactgccctccgcctgcttcctggatgggttctgtaaaacggagccttccttccccaactgtgcaattggcatctgacaccagcgatttacatagaaagggaaatggtgccttttctaggtagtccccgtgccagcaggactccttctcgttttctgttgcctttcttgaaggaagaggatgacaacatagaaactaaggtttttatgacccctggagcacttgtgaggagttgacagctttagggtcatgtccagagttgtcttaattttcccagatttgcttctttgaaactgtctcatattttaacataaatgttgtgctttggttcttacctctaacagattaaaaaggctaaacaatgaaacgtacagttgtgtttaagaaacgtcactctaagtatacatactagatacgttccttaaaagttgcctgtaatgcagaattctgtgaatcaattcctcctttcttcttgacgcacattatagaaaaggaaaagcattccttctgggggagggaaaaacatctgaccccaagacataataaaatcatgcttaagaatacagtaaactttaaagtctcttagttaaaggaaatcaatacttttatgatgaaatattaataatactaaaaaaataagtcaaaactacaaatgcataatagctagggtgatttttaatgttggacacattagctcagcatttgtgaggaggaacaaagggaaaagagagcaacctagcccatttgagaagcccttccggttcctaataagtcccctttttgtgggtcatctgtcaagaagacacacacctccccataagtgccaaccttatttctaagcattttgttgaagctaccgattttggaaatgaaaggatgaatgtagctggagagaggaacacacacaggtgtgtacacacgcacactcctgcacacacatgcgcagacagggcaaagagaaatggagaattggggaaagccatttatttgtttgaatacactgctggctgttccctccgtccccatcctccatgaattattctggtagggatctttaagagggatggacttagagtagattgaaccatatgaaatggctgtttctgtaggtcaagttagttgaatattggcagttgcatatggttcaagctcatccattcaactctctatcaaagaaatgcaaatagaatagtcatgtgtcttgaatgcagtgtaacatgaggtttttaagaatctagatgaaaataacttcatttttctcgtaaacgattttcatataaatcctttaaacctagatatttaaagttcctttagaaaggctctctcatgtctcactttgttaactcctaaaaccttcagtcataacagctaatgtgaggaagacttttgttttgtgttgcgttcttttctccaaagagctgggccatttcttttgctacatacccctttgtctaaagacacttacgaaaatgaaagtcccaggacaggcgtgggggctcacatctgtaatcccagcactttgggaggctgaggtgggcggatcacctgaggtcaggagttcgagaccagcctgaccaacatggtgaaaccccatttctactaaaaatacaaaaaaattagacaggtgtggtggcagttgcctataatcccagctacttgggaggctgaggtaagagaatcacttgaacctgggagtcggaggttgtagtgagctgagatcgtgccattgcactccagtctgggcaacagagcgggactccatctcaaaaataaataaataaataaaacccaccactacaaaaaacagaaaaattacccaggtgtggtggtgtgcacctgtagtcccagctacacgggaggctgaggtgggaggatcagctgagcctggcgaggtcaagagactgcagtgagccgggatcatgccactgcactccaggcttggtgacagagtgagaccctgtctccaaaaaaagagaagaaaatcccagttattgcctcattgggcccaagttccaggcaccgtaaattccagccgaggaatcaaaacagcgagtgctacctgaacatttagattgcgttaatgctttcatcctcacgaaccctgtaaggtgtggtggtgtcactctgctttagagtgacaacagtgctttagaggacacaggctcgtggggtgaacaggtcccctgctgtcacatgcccagagccacggcactctcctcaccaccgtatcctgtagccagagtaaaagtgacaagcctaaagccaagttgctgctcttcaggtttctcccctgcagatagcagaaggctcatgtccagccgtccggttagccatgtcccacaggtctgccagggcagacgtcaacagagccctgtccacttaacaacctcagctgtgggtttttgaagcttgttctgtgctgttatccatcacggcctttctgtggctccgcacatactccctgattctatctgactcacatagttccagatagtatcttcagttcttgttgtagatgatgtgtcatagaacgtcatcagccatcggtctggcctagccccaatctgttaaaacacacggtaggagagactttggtgaggtgacccagctgcagaagttaactaccccaccctgcaaagtcggagtcctggcgaacacaagcaaatggaatgggtccacaggcatggtgctctctgccttgggtgcatactaagtatgtgtcaacggcaggtgccttttgcagagaatcaagactaattccctggcccctttgtacagtgccacctcctagaacacacggagcaggccaaacatgtcagtgtaggatacacactgtacggcctccctgcttctggccaaaaaggtcaaaatggggctgatgggataagagacttgctggggaagaatctggcgctcctggccgggcatggtggctcatgcctgtaatcccagcactttgggaggccaagacggctggatcacctgaggtcaggagtttgagaccagcctggccaacatggtgaaacccatctctactaaaaatacaaaaacaaaaaaaattagtggagcatggtggcgcacacctgcagtcccagctacttgggaggctgaggcaggagaatcacttgaatgcgggaggcagaggttgctctgagccaggattgtgccactgcactccagcctgggtgacagagtgagactccatctcaaaaaaaaaaaaaaaaaaaacaactaatctgccactccttggccagccagaaccttggggggccatcctttgcaagcagggccatagtgacccaccctgctcctggtgcattcctgattctgctccagctggggtcagtgagcgcctgtgcctgggagtctcctgggtgctgtctaacccgccttcctcctgctgccgtttcagccctgctgactgccgcagtagagaggcagcccagatggccgctcccaagcttgctagtgccttggctgacagactgttgtggaggtctttgcttgctaatttacagacggtaataccagtggaagagggcaggggctgggcgaggcagggactgggtccttgggaatcaagcccagccctggcgaccttcagttctagaaatccaaagcaaggttgcaccactgcgagagattccaagatctggtccacctgtgtcccccatgtgccatccaaccctctgtggcctggataggtgctcatgtaagatgcacgcattcctcatattcacacagcccaaatgcccgcccccccccccacccaccccctgccggtagcaaaaggggcattagacttggcagccctcacaggcagaccttcacccgacagcaaaaacatttctaagggcacaattaggacacagagagaaagcaagatactgaaagaccattttttcttttctgcaggttttcaaggatagtgtttaaaatctgagaggatttatccatggataaagagctataggctaaaagactctgcaagttcccagctatttttgtatgttggacatgttatccgttgaaaagcaatcagaaataaaaagtatttaagcgttgtgaggtgcagcctagtcagtgatcagtgatgtgggggtcgcccatggtggcagctcaggcttggcccgggaggccatacgaacatcccttccccaggtgcctgatgtgtagacctgcgccctgggctggacaggaagtggcttcttcagcaccagtgcacaggaagaaaaccagatatcaccatttgggggcaagtccttcattgccccgaaagcacagagttttgtgcactgaaacagtaaatcatctgagacttattaaagggatactgaaaaggggtctctgtgcatatacctgaagctttcccaaacttcagggtcctagcagtgagggaggaaacttctggggccccccaaggctcctgcaggcccttggagtcactgctatctgaaccctgcccacatgtcagtgaatgcttttgtttctctttggtttttgtgtagattcctaagaggagtcccgggcaaggacccaggcctcacctggcccatgtcggtgtgctgttgctagacttgaatctgaaccctgcttcctcagcccccaacacgtgctctttgagcagccgtgggtagtttgggccctgtgccctgtcttcctaaggtggctttcctagggtagccccccactgagtagctcctagcccccgcctgccctcgggtattgctgtcatcttgccagggtgtaggatccagagctgcttcttgagtcagaagcacgaacaagaaggttctatgtcacctgcagatctttctagtaagccgcaatctgtccagagccaccagcagctgaagtcccagacttagtcacctcccagccccccatctctcgccccagggacctggcaggctgcactgggaggtgaaagggcagatccaaggaaggagccgacaaggggagaaataaggccatgcacacttgctgtcttcagtttgtgtgcgaggtcacagggccgattgatttttttttactgtttcccagcatcgtgatgggtggtgagaaaatatgaacactgcatcgtcagaaacctgagccacagcctcggaatgaatttgctaatgaaaggcaagctcagggcacccacgcctcatggtcctcattcacggcagagactgtggaaaatgcacgggttgcttctcccgaatcagccctcagcgggttttatattatgctttgcaatctgcaacaaccataaataagtgtaggtttttcttagggcaggcagctctcctgtccaaatcttagagctttttcctaaaagaggtctattgaaaactggacttctttgacacacctctaactgagatttaaatgtcttagtctcatacctcagactcaaaagccccccacctccagagtttggtcaaggaggccccaaggtatgacagacaccctggggttaaaaacagaggctggagaccgggagcagtggctcacacctgtaatcccaggactttgggaggccgagggaagaggatcactttaggtcaggagttcgaggccagcctgcccaacttggtgacccatctctactaaaaatacaaaaattagctgggcatggtggtgcatgcctgtagtcccagctacttgggagactgaggcaggagaattgcttgaacctgggaggcggaggttacagggagccaagatcgtgccactgcactctagcctgggtgacagagcgagactccagctcaggggaaaaaaaaaaaacagaggctggagacccctctggttgcatacaaacggttcacaagatagatggcctggcttcgctggcttggggtttcccacttcttaattttcaaaaggagtatgaatgaagctgtcaacattttcaaaatcaggaggtgttatgtcaaaatccagatatccagcttctcttgacaaactggagactgcggccatactgaggtccatgttctcctgcagcagcagttagaagaagctggaatctgtgctttctgatttgccccagtctctaccaggccctgccatctccctggcacaaaagctgaatgtcccatggactgcatgtattagcatgcctgcactgttgttttaatagaagagaatggtttctcagtgtgcgtgtgtctattaaataaagggaaacagatgacagatagagaggaccaccagtgttttatctccagcccctcctcattacattaccgggctggccagccttgccctgtctgattttcaaaagtaggatccacagaagtgtctagaaaggggaggggaaggccctccttggtaaggcaccatgccagcccgagcagttccattttcatctcatgtataaattggagtttcaccatttagaaaaaatgtttgaaaagggctgtcatagggcgttatctttgaggaatgaggttccatctgcagtcaggcagttgtatctcccattaagctgctttcaaagacatgccccaggagggtttcatgggacagaaaccttgtgggtgaattggtgtgtcgtgtagatcgcctgtttttttccctgtggtcttagctcctaggaagctcagagttaaatggtgacattagcttcccatagcttgaagtctttctgatataacttttcaccttctattgtcgggttcttatttactttttgttttagtagctttcagtatttagtatctatggcatttaggcttgggttttaaaatataacataagccatctcaaacccttcctggaaacaggtagtatgtaagggcatctgtagggaatgaggctgcagggcgaggttagtgcttttgagttgagtggagaatccccaaattgaattcagagccaactgggttccttccctttcagctccctaaaaggttcctgtggaatcccctataatctcaggtagttttcacatcttccaagggtagatttttttttaagcctgaaatagttgcactttagtcacatggccagtatcctcagagtaattaccaagtgcaaagcggcaccaactccaggcaggccacagaggtcggggggcgtccctgctcatttggagattcagaaaacttttggtgcaagcccactagtttttgtgcctacacacatccaagcccttcccaccctttagtctctctcgggcctcgctctttctgggtcttaacaattgtgtgtaatctctgtgaccaggtgtgaacccagacaaaaactcggtcccatctctggtttctacccaaaaagtccacttgcaccacatgggaaagagttgaccaagtgtttcataaaccctaggtggcgggtcacctccccacctcacttgcccctttccctctttcccttcagcccaccacacctagattccacccagcaggtacagggcagctttttctgcaccaaaaactctgggagccagcccgtcccttgtccctaggggacttaactcacatccccgcattaacaaagttttttccctaactgtatcagttaagattaagttcaactacatagtaaagataaactcaaaggggaagttaatttccctctcgggtaaaagaagccttgtagtcaagagatacacaaagacgtcagggacccaaactccttccttttcagtgctctgctgtccctaatgtgtgattcatcctcatagctcagggcagctgctgtagttccagccattgcatccattttccaggaagcagaatggaggaggatataccccctttccttttaaagagctttccaggaaatcccacatgccacattcatttctatctcactggtcacaacttagtcacttggccacgactagcttctgggttctgtaactgcaaccgaaagggagaatggttattgagagacagcttacaatatcaagaacactgtccaaaaccctcttctttttgcttttttgttttaagccttcccaataaagtgaacaaaaccctcttaacctagaggattccaggtgctagctattaatgtaatgataatcatcacactaaatacctaaacatctttgcagtcaaatttcttatgccctgcttaggtaggccgactcctacacagccatcaaggccccaaggttggacagagctgctgcagaagcacaggggagagaatagttaaccctaccttatgcaaagactcctcccaggctaatgctgagctgcgtgagccatgaagaatggggcaggggtttgtaaagacagaaaagaagcaaaacagaactccagaccgagggaacggcctagcaaaggttgagagcaagtggttcttggtaggaggtctgaggactgacctaggctgctggaggcagatcgccatatttccacatccccactcctatgcacacccagtgattctggggttgtaggagggccttgactcgaaagatatctgggggttccagcttccctgagtcctatggatttgaccaacaatctaggcataaagagcagagattatcaactcaaacgcccacacggccaggcaagttgcaagagcagggacccagctctgctcatctctctcccgttgctgtcctgcaggaatggggccccataaagccagatcttttcattttttaagaaagcagaaatccaggtctgtgtgtaaaagctcccaacgtgtccatggtggtacctccaacaaacacacatataacataaataagcaaagcgaaactcgtgtgcaagcccctaggcggctgctggccggctctgaatcttgaatcacatggttaagtgattattggtggggaaagcttaaagacctgtagaagaggaggaggggggcatgtccaaggtctcgaagtcagtttgggcagagcttggactcaaacctggggttctgactccaagcccagctttccttctgtcagtgggcctaaaaatagaagactgaccttttcttggtatttttgtgcttcacaaatgccagagcgttattcattagttcatcttcccaaaataactggcagaacacggccagagggcaacaggaagactctgggctgcgccccccgaccatgaaactgggggctcctgggaagtgggggatgtgtctcaccatgggcatagtttccccccactgttggagtggcctgcctggccctgctcttggtgagtccaggggagagagcttcagagggcagaacagatctcaggaggatgttaggatcgggagcttgagtctatccagttcccaggcagtttgtgttccctccatcatcctcccttttttttctctttttggtttaaaataaggtttacaataggagtcttggaaaattcagacaagcacaaaaaataacaaaactcactgcagtacaactacctgcttctctcactgtgtcagcttcaaatctccagctgccttctctgctctggacaagggggaaagagagcacaaattttttgcaagagcggaaacatatgggacatgctttttctaaccttttttcattgactccatcttgagcatttcccccaacacttagtcttctcttaccagcgtgttggttggcagcagggaatttcatcatgtagagggattagaattcacttagcctttccccagttcttggacttatcagctgtcttctgttctctgttctgcacaccaatatgctgaatatccttgtagttcggtatgtgcatccacccacagtgtcgtctgcagcatgggatgctgcaggtgtggaattggtcagatggtgtgaaagtccatgcagcctctgatacacattttgcaggctgtccttgaagcatacccagggagagccaagactgttatcactggagaggatctcagggaggccggtttgccttcactcctgtcgcacgatctctggcttgtctgtgtgtttgcacctacttcgcagcccaagtgtgtttgattcatacaccaaaagcctctggcacctctgccaaagctagttcatcagggactgcctgactgggatgaagcaggaaccagaggacagggcgctctggccatagacattcaccctgaattctccccagcaccctcctgattctctgatgtgttgccgctttgatttggggaaaagccccttgaaattgcaggtggggggccttggccatccagcaaaataaaggaaaaaaaaagccaaaagtcactgtggctttctggtctcagtgccactggcaaagggagagagagtggaaaggagggaagtgggagttttagtagaagtgggtgagggagagatgtgttcagtaacctctgctcagctagaccctgcaaatggatgggatcagtagttggtgatttttttgtttgtttgtttaactcagtacatgcagattttactgccaatctatgacttgatcccaacccattcccaaaataaaagaatttaagcatcctgactgcagtgccagcttctcatctgctaccctacatgtcccactgcagatgtcttttgataataaaccaggtttatgatgctgtaataaaccatggctttaaagagggcaagagaaaagacgtgtcttcttcaaatgggcctgtgaccaccttggcaacggctatgtcattgatcccttccagccggggtcattgtcgggagcatacaaggtgtaatcccaactctgttactacactggctggccctctgttcatggccctgataaataggcagctcgggaaaagccatcttgacattttgatttgttaaggggtaattcattttcgaggcaagtaaacagcttgtaaactggggggtttaccgctctaagtgattaagaagtgagcagctataaaactggttccatgaggctgcggctgagtgtccccaaggaatcttcctgcccagtgtttggatttgccggatgtttgccatagttcatctgagcgggcccccgacacacacacacacaatatatcacattgtgcctcttcctgagaactccagctacattcatcctgcctttctctccgcaagcagacctctgcggtaggtgcgggcaggaaataccctccacgcaagaggagctggtgctcaggatgaccgcctcactcggagactcaccctgctttcactgggccccatgcacttgccattatagtcagcgcttgttaagtcacccccaaaacccaactgggggtataaatagggcccttgccttttaaggagctgatctttagacgaaaacagcttcacatgaacctgagtggaaatagcccctccttgatggcccggagaagagtcctgctaagccctaagctgagccgcaggtcccatctgtaggtgaaaggaaggaggctgagggacatcagggacttgcccaaggtccctcagctgggaagtgagcagaggagggttaaatcccaggcttccctggtgccataacctgggtgtcatcccctgcaccagatgggcacactgcttctgtccagagccaggtaacctggcaaaaaagccttttaggctttgcaggccatgtggtcgctatggcaactgctcaactctgccgctgatcgagaaagcagccatagtctctgtaaacaaaggaccgtggcttgttccagtaaaactttacttaccaagcaggcagcaggttgcaggatgccaacccctgctaacaccctgcagccttcctgagtttcaagaaaggtgaggtcagggcctagagggccttctggaagtagtgttagtagagagctggaccgtgtgaagttcaggcagggcaggtggcatgaatggggtccagggctggctgtggtgaatgcattcgcttgaggagtgggaaggctgcgggagtgaccaagagggttgagatcccctctctcagctggaaggaggactcgcccccccatatctccaccgcaatttggggctgcttctgtgccacgaagcaccatcaccatgggtcctgcttggctcctaggggctgaagtcgtggcctgcagaaaagcacatgtccaccagaagaggggctcctgggccggataaaaggggctttgatttatcgtaaagaacacgtatcggccaggtgtggtgacacacacctgtaatcccagaactttgggaggctgaagcaggaggatcacttgagtccaggagttcaagaccagcctgggcaatacagtgggacccccatctctaccaaaaaaaaaaaaattatttgggtatggtggcatatccctgtagtcccagctgctcaagaggctgaggcaggaagatcacttgagcctgggagctcaaggctgcagtgagctgagatcacaccgctgcactccaggctgggcaacagagtgaaaccctatcgcaaaaaaacataaagaacaaacatgtatactgagctctcaccatgtgccacaccctgttctggggtgtgataatagttctttcattttattcccacaacagtgggagtatgtagtgatactccaggttgtggctgggaaagactcaagagaaacacaatagctgttcaagtgtctggtgcttctgtgtgggaaacaggggtgcacccaggtctgagtgtctccaagatgaggggctcgttcatccccgctgggtcagtttaccgcagaaacgtgtgggcagactccacctccaggtcccggagatgctgagggccatttgagaccatcatcactagctctttgccagggctttcgttgttcctgaacctgacttccctagaacctcaagggcagagcaaattctctggaaggagcgtccagggcactgtcctcctgcccgggtgtgacttcagagcgtgggtcccccaggtatgacttcagagcatgggtccggtgcccttccttggacaccatcagcagaagcctgagactctaccatgagggcatctagcatccctgggtgaacttgccacgaggctgcacgtccctcttcaagggcacagctggcacgctgctgagccagtatcaggcactcggatttacgactcatggccccacactcagctctgtggctggttgtactctgttccttgaaataaacctgtaataaaccttttccttgaaatagcttcaaaatgtggctgggtcagggccacgaccagtgaggtcagcctgttccagggaacagagcaggactttcaaggaactgaggttgggttgttcagtggaaccatgacattgaggccctcaggcctactctttgcttccacttggtcacctggtactttgtcttgcaggcttcgccgtggcccagtgcataaaccagcacagctccccgtccctgtcctcacagtcgccaccctccgccagcgggagccccagcggcagcgggagcaccagccactgcgactctggaggcaccagctcgtcctccaccccctccacagcccagagtccagcaggtattggccacgtgactcagtgatatggggacatttggagaaccccgtgatccctcaccattaccaaaacccctgacctccaggtcctccttgtcacagcacttgaaggatgctgccgctcaggtgatctgcacatgaagcctctagagattcctctaacttgatgttccctcccaggctgggtcagctcccagatggggaagaattgctcctttttcaggccggtccccaccgaagctgtcactgactgcagagctgatgggcagcaggcgggctgcacctaaacccaccctatcatcacctccacagtcttaggtgtcacaaggaggggtctcccaaggggattgtttgcagtctaggaaaagaatcgcgttcctgctgattttttttttcctctgtaacataccagttttgtccttaaatgtggtgcggtccagttgttcgagtaggcacgcactttgccactctttggtaggatgtgatgaagtcgtatcttgccatccttcaacttattccacttcagacatggcacagagggaacccgggagtgaatgggagcccctggagtcagcctggaatgggacatgcaccagctcctcgttctcggctgccgtgagctattcgctgtgtgagatgtggggaagtacagacaccaggcctctggcacaacatggccccaaattgtagccagaggagcagggatgagcatccatggccttgagccagcaggatgttctgtgccccagcagcatccccccgccatgggtcggggggtcacaccaactgcctgcacctctgactggagatccttagtatccttcactgttcctgcaagttcccctccagagccctcactcatcatatttcaggggcacgtggcccacctctcattgagttctggattgattgatcatggcaggaggacacgggctactgcagagccagggaggtcgagggcccttggtcaccatcctctcagcaccaggagccaagatctccctgggcacctacacctctctcttgggcacttccagcttttgcatttccagttcatgcctgtggctcagagcaccccaacccacctgtgtctctcccatccacacacaatgttacctgcacttcatattgacttcacgaggcccaggcaggaaagtcaccccacagccacctcactgagagatcctcttccactcggcacctgctccagggcatgaccaccccttctgagctatttctgagcccaatttaaggttggctgcacatccaagcagatgccacccctgttgccaggcttgtagctgggaaactccagcagagcttctttcagaaactaagacgcaccctcagtagccctcttgatcccgtttcatgcttgctcaggggcgggcatgcagggttgtgtgttcatgcaccccaacgcacatatttaccgttgcactggggatgaaagcttccttgcccttgtagctgtggtcacctttctgtcatttttaaggacgtacagccaacagctaagtgaacaaacagccatatacttctttgcctaaagttaacaccggcaaagacccacagtatcaaaaatgatcaaaaatgggcttctgtatatggatgtctacctgaatgtgacccctgaggcttcaactctgcactttcccagggcctggtgtctgcagtgtgtgctagtttcttttttcttggcctccctcagcccctctgtccctacccccaccatcccctgcatggtaccagcgtaatgtcttctcatctcagaaatccagtggctattaacttggctgtcaggtggccaggcagttccagtcaataagtgagagtcaggacctccgaggtgtctgctcccatttggtgcgtccccagcaggcctgcggagacaagtgtgtaggtccccattctttatgcagcatgacagtaaaagcctgaggcccagcctgcctgtctggctctgcagacactgagacaactcacctgatgaagggccatgcccggtgggcagcctgggctttactcttacagatgcctcaggatgcagctattgatccctggcaggagagctcatcagagcccacaagctcctccctgtcttgaggccagacttctaggccagcctgcaatctccctcccagtccacccagaccaaagcatatgggcttcccatgttccttgtagggatgggcctaaccagatggctccaacatctgcctgctgttccagcaagccgcagaggagagaaagccaaggacaggagaagggagacagctttgttgggataggagcccttctgccagttgcttgatttgacattggctcagagtgcgactcagcattcaggcttctgatgagggaaggtcaccctgcatggctcgctcacccaactttccacccaccagggacctggccctgatccaccagagatgatatccttggagggccagccaggcagcggggtgggccagggcctctcctccaagctcattcatcctaaccgcccactgccttcagcctggacagcagaagacagctgcagccccctacaaggggcagcatgtcctcaaagtggtttttgagggtacagtgctaagtcagaggcgatcccgtctctgtgattatggagcctcccagagtccaggaagctcccttttgtagagagcggctgccagaccctccgaagtcagaactaggaaaccccagtggcttctttgccattgatttgttttttgttttgttttgtttttttgagacagagtcttgcttagttgcccaggctgaagtgcagtgtcgcagtctcggctcactgcaacctccacctcccagattcaagcaattctctcacctcagcctcctgagtagctgggattacaggtgcgcaccaccatgcccaactaatttttgtatttttagtagagatggggtttcaccatgttggccaggctggtcttgaactactgacctcaagtgatccacccacctcagcctcccaaagtgctggcattacaggcatgagccatcacgcctggccctcctttgcacactttgcatggccaggtgtttggctgggcaagtacacaagatatgccatcccccaagtgatgagacaggcccagttttccatagctctagcccacggttttgaacacttgaattgttcaaggatgttgttaaaagctgggagtgaccttcatgctgttttgacagttggtgtggcccaggcacccaccaatcagcctaggctcctgctgtagccacggcagggccttctcagtgtgcacctgctgtgtggcgtcccagtagatactcctcctgaaattgagcccacctgtgccagacaccatgcttataggcacttcacagatgtccccttgttgaatcctgccacactccgcctcacattgtacagtagaaaacacaggggcccagaaaggctgtgcaacttggcccagaggatgcagctagccagcagaggagccaggatctgaagcctagccttggcagccctaaagcccatgccagcagaatatccgatgcggtttccaagactgtctcaggcacctccagggtgtcgcagagacccgggccccgatctggatcctggttggaggcagcccatgaagtatgtttctccttccaacgtgcgtggctgctctagggcccaagtgaaaagtcacggccccactcgtgaaggcctgctaacatgtacaaccccagccagcagaaggctgggtggtgtgaacccctgggggaggaaggcctggtgctttcctaaaatcagcagcaaagtggaccccagggagcccacgtgggttcatcccacatgaggcagtgaaaccagctgatgctcagttgggttttccgcctccagcctgcgtccagctcaggggaccttagatttcctgcctgagtttgaaaactctccacatttatcccaaacacgttctcaccttcccgtggggacctcagcctggctcccaggatttaggctcaggctgtcctcttggttttgtggacttgagacctgatccaagagatctctccacccgcccggcccacacgtggccttccaacctcttagtggctcatctccctgcatcttatcttccctgggtttgggcaccccactccctgtctcagtgaattattgttttccaagcaagcaggattaggataagtccctactgtgcacagcattcaggatacaatgtggcaaaaagcatgatcttgcaggcaggcggggtggctgaggcctatcaggtggccacccagaggcatgtgcagttacaaaccgtgacaaaggaaaggtgcagcaggttctgacagccgatgcagaacagtgcgggaggctcccagaggtggcatcgctgcagatgacagccgggggatgaggggttggtgaggccctggtccgtgaggaaggtggcctttgggtctcacatgaggccaccagggtcccaaaccacatctcctagagaccagtggattccttttgcccatctccctggggtctgcctgtacattctgtcttcccaaatgcagacgggccgtgggcaggggggaggacacttttgaggaacattccccatgcccatcagggccgcggcctatagcccagcggtagcttcaggcccagtacaggtgagggcctctcagctggaagggggaaggggacagccccgaggggtcactgactccctggtcacccggaggctccctccgtgtgcagcacctgcctctgagcctccttcgcacgccagaggcagagctatgggtgccctggagtggctctttcagtgctggccccagaccaaagggagagtcaacaccgaactccctgatgacccgagcaactgtgccccagggcactttaatggccagtccttttgagaagtgtggtgagatcctccagtgctctgtggggagagcccgacaccctccccacgaagtgtccaggagccaggcatcttgtcgcccacacatccagcagagctatcctggcaggcctcagccagcccctagtgagaaaattgcagggttggaatcagcattttttccccttaaacattttatggttttgagaagctgaacttgcaaagaatatacagcgggaaagtgaaaaaagacccaattttagaaccacatgtggggccacaggaaaacgttagaaatatcttctggtataccactgtgcacccacacagtgacacttctgcatacacacagtcacacatgccaatgcgcatgttcatacagccacacatacaaatgtgcatgcatagtcacactcccacacagtcacacacatgccagggcacatacacactcacacatacaaatgtgcatacatagtcacacacaccagtacacatacacactcacacatacaagtgtgcatgcatagtcacactcccacacatacacaatcacacacataccagggcatacacacactcacacttacaaatgtgcatgcatagtcacactcccacacacatacatgcacacagtcacacacatgccactgcacatgctcacatacacaaatttgcatgcatagtcacacacacatacacagtcacacatgccactgcacatgctcacacagtcacacatatacaaatggacttacatagtcacactcacatacacagccacattcacatacatgcacacactcatacagtcacacgcatacaaatgtatgtacgtggtcacacacacatacctgcacctacacatacacactcacacatagatgcacacagtcacatacacacacacactctgagtgagatgccgataggaaaaccatctcctcagataagaactctgacctacagtgagttccttaaatagcccactcacacctctgagctccagattagttggagttcacatacattccaagtgaactaccttggggaagacagaaaactgtttgatcaaaaatgaggacagtgtgaatgtcagcctgcttatttatttatttttaatttgggggagcacatagtaggtgtaattaaacattcatttttaaaaaacaaaaacggccaagtgcagtggctcatgcctgtaattccagcactttgggaggctgaggcgggtggatcatgtgaggtcaggagttcgagaccagcctggccaacatggtgaacccccatctctactaaaaatacaaaaattagccaggcgtggtggtaggcgtctgtaatcccagctactcgggaggctgaggcagaagaattgcttgaacccgggaggcagaggttgcagtgagccgagatcatgccactgtactccagcctgggcaacagagcgggactctgtctcaaaacaaacaaacaaacaaaaccacattgggttatgagtcatggccaccttgattgtcccctgaggttttatagaaagaaagacaggtctggctgctgttgacggcccagtgcagggagcttccccggcttccctcccatctggacccacccctgtgcctgtgtccaagagagcccccttcaccccaccacacctcccatttgggccaactgagagtcagatgacctgaaacccacccacatgccactcaactcggtcaccactgtcccgctggagttttaaggacagaaaccccaagtaagatatcgtcccttttctcagttttctctgtggcatcatccttttttattgtggtaacatacgggtaacataaactaccattttcgccgtttttcagtgtatagtccagtggcatctaaggaccttcacattgtagtgctctatggcgtcacattcaagctgtgtgctcacccgccttcatctccgagagtgtggtttctcccttcgcagtgagatgctcccgacgtttttatttcagccaattagaagccccactcggccacctggcacctggtctccgctctcctgctgtggttcagtcttgattttcaaaggcacgggtcaccaagtcgctgcccagttaggtggctgagggagaggctcgtggagaggctcgtggagcgcctcgagcatctgagctttctcaggactcggagctgtgctgttggcgtcagcgtgtgacaccaagaacctcctcacttggggtcagaaatctgcttgattcacttagctggtttgatgccagtcctccagccacacaccctgccctcctcacactgtcctgaggatgccgggttttcgtgtcctgactcctgggccatgtctaaaactgacaggtgattctgttcttccgtcccctgaggcttccgaccaagaccagatgttgcggatgaacccatctttcctttccaacaggactccaccttctctgcccctaacccggttaagttgcacgagtgaacaatttggttctcagcgatcccgaccctgcctcatcctgggggttgcatggggggtgtcttctctgcatggggggccagcgccccatgcaccggtggccacaagcccatgctgggcactgccccacgaccctcgcccctcgtcagtgctcagcgtccgctgctgctcagtgtcccctccatgtcgcctctgccgtcccattgttaaaggctttctatgatctgtcgctgtgttttccctctagtcaggagtggcaggaaaggacgccgacgagtgttcagcctgtcggaggccgacagtcatggcggccactgggtttagtgctccgaacggcagctgccacggcacctcacgcacagtcaattcaggcaggtctcccctgtgagccgctcgggccgcgacgtccactcgccacgctgcatttccacagtcggcagggtccgcgctggcaaggtgggccaagctgggcctgagcacagagccatttgccaaggcggcacttccccattttcccccaaagttggttctccctgctccctgtctggcctcacctcatgtgaagaccagatccccggcccttgaccttcgcgacagtccttcaccttcgcgacagtccttctgagccagacctgtacagcctggaaacgctgtccttctctgtgacgtgtgcaccagtgtcaggctcggcccgggccagaagcagatgctcctgccaagtcccccaggggtccccccagtttaggccatgggggttgggcggcagttggctggcaaagtgagaatttgtagaaagcaaccaagaagtctcctcatttcttttttcctttcttcccctagtcttgatctaagataagtggcaaattcagtcctgttttgaccggaagccaagagccatttccctcatagacacatggatggatgtggccccaccatctccctttctgagtggcacccacacagcagtgaggctgatccatgggccaccacccagcagcctggctcgctgtcggggccatccctgctgcctcccctatgacgcttcttctgtggtttctgatgcgcttttctccattggccgttgcgcttgtctgctgggagcctttgccttcttttgtgttgaaatcctattttctctgagctttgccctccacttgctctacaggtaccatccttttcttccccacaacactcagccccaccttttcccagcccagcacaacaaatccaagtttttgctggaagtcaccatttgcttgacaaggatgtgttaaggccccaccctaggcctgcagatcagtttctgaggtgctggccaggcacatgggggacctgctgccttggtgtcctcactggccacagccacgggatgtctgtccgctgcttatggaaacgtggccttcctgaatgtcccattaccccctcggctctgtctccccagcccgtggccaggaagtcagacttttctccaaatccctcatttcctgagcctggcctcaacttgtggccctagagttcaaaaacaccagcaggcatgaagccaaggcttcaccagtaacttttgcagctcagcacttgactagaaaaaagtgtcctcactgggtaattttccccccaatgaaaacctggcagagttctcctttttcacctgccttggttggatacccttgtagatcaagttcaggaagcagttcttaaacaacaacaaggccatgtcataggtgatgggtaagaagaggttattttttccctatttaaaaagaggctacttttagcggggaaaccaacccttttaataaaaattgttggtccttttcctgaagaagaaatcagttctgtgcgcatgctattgttagttggtttgctctttttgatatatttgcctacaaggtttccacatccctgattattctcataaccaaacaccccattaaggagcagggaacgaagttggccagcttctttgaatatctgcatgcaaatgcagacttgagcaaagagagaaaacacttacatcgaaattttaagaaaacgtgaaggtaacgcttggctactttgtctccagatggtaggacagtgccatttggggaattagtcatttctaaactgcctcctcagcagcaaaatttatgtgtggatccacatgtgtgtgagtttgtcacaggtctgctcatgcccattcgaagcaagggcagaggccaccagagcaggtgagcactgctcagggaaccacaggttctgaggaacagcaggcagatcgtgctaggtcagggcgcacgcctgagctgaaaccagcccagcaccgcaagccatccttactgaatggagcaaatcagttgaaattcaaagaaaccagaattcgcatgtagtgtttactcagcatttctgggctcagatcacacctcaaatcactttttccactagtgttcaccgatgcccattgccaccctcccagagcgaggaccaaagcctcatgcagtggtttcctctagatctctctctctctctctctcttttaaaaaagacattaggaagaaattaattgggctgggcacggtggttcacacctgtgcacatcccagcactttaagaggccaaagcagaaggattgcttgagcccaggagttccataccagcctgggcaacgtaatgagaccccgtctctacaaaaaactttaaaaattagccaggtgtggtgacacgggcctgtagtcccagctactcaggaggccgaagcaggaggatcacttgagtccagaaggttgaggctgcagtgagctatgatcatgccactgcactccagcctgggtgacagagtgagaccctgtctcaaaaaaacaaaagaaatgaaatgaattgtgaccttttagagttcatcttgcccagagtcttgtggggagaaatgccggtgtgtgctttgaaatccagtctgtctctcgtgctttcgctccgtgatgggagctctcttcctctccctcttccctttctatatgctgcctgcttttatttcgttctttgtttttccattattttgctttatgttccatttgctcttctgttttattttggcctgacttaaaagagaaaataaaaaactaaactggaatcacgttgaacaaaaaaaaattctaccatgcttcccgggtcccaggctgctgtcagactcttagctcgatatagcatcgtcagcacctcccgccatggcttggggacccccagctctgtgcaaatgagaatttgcctccaagcaggatgcccactgtcttcttctcaatgtttttaaacacccggcatctgaagtgctggaagatgttttccacaatgaattccagctgcatctggtgtttctgttcaggcaggctcatcactggaaggcaaatgggccagcatgtgtctgtaggattttgaaaagggccgggcacggtggctcatgcctgtaatcccagcactttgggaggccgaggcgggcggatcacttgaggtcaggagtttgaaaccagcctggccaacatggtgaaacctcatctctacaaaaatacaaaaattagccggatgtggtggcagatgcctgtaatcacagctactcgggaggctgaggcacgagaatcacttgaccccgggaggtggaagttgcagagagccaagatcatgccactgcactccagcctgggcaacagagtgagactccgccaaaagaaaaaaaaaaaaaaaagcaccaaggaaagaaattgctgctccaagaataactgcgttgggtggaacctcacctgccttgtcctggcgtggtttctcagtggcccctgccgggaagctcgggacaataatggcctgaggaaccacagcagccccttggtgggtgctggctcagcactttgaggaggaggaggaggagacaggccaaggttttgttttggttttgcaagctgaaaagttctacagaatttcctttttttttttttttaatattgcagtgggttccctcttgggtaaatgtcatcaaatgtatactctggaaatggcctgatattacgagcacacccaagcccatttacttcccaaacaagtatttatcatcaggcaggcctgagatttgcccacacataaagcctgtcagctgggtctctgcacccaggaactgtgctttcataagccacatgctgattttgcacaggccctgaattttcccctcatatcacaagtcagggtaaccctaggccctgctgtattttccccaggcctaagtcagactggattttgcaggttctgtgtccccaaaaggagtgagtggagccacgctgagccctcacgccagccagccacctcccacctagctcaccagggccgcggttcaggatgggagcacagggcgcagtgcgacggggtgtctcaagggctcagtgtgtttccggtttttctcccccaatccagatgcccccatgagtccagaactgcctaagcctcaccttcctgaccagttggtaatcgtcaacgaaacggaagcagactctaagcccagcaagaacgtggccaggagcgcagccgtggagacagccagcctgtcccccagcctcgtccctgcccggcagcccaccatttccctgctctgcgaggacacggctgacacgctgagcgtcgaatcgctgacccttgtccccccagttgacccccacagcctccgcagcctcaccggcatgcccccgctgtccacgccggctgccgcctgcacagagcccgtgggcgaagaggctgcatgtgctgagcctgtgggcaccgctgaggactgagtcagtgccggggcctccctttgtgtgtgtggccccgctggtagggaccccagtgccgctgactggcaagacacactgggagcacccaccattctgtgcggcccccagcagccatctcaaccacctatccctgcgctcccttgaatgggaagaagccccacgttgtccttgaattcctttttcactttgcatctcttcacgtgcaggctgggaccagcggagacaccgcggcgaatgcagatgactgcaccggccactcagggagctgcctgggctccgtgtctctgagccccgggtggcaggacccaccggcacctctttcttcctctgtcatatggctcctctgtcaccagccccagtgtgcacagaagaattggaccaggtcactgtacgtagaaatttgtagaaaagcagacttagataaacatctcctttggatatttatttccgcttttggcagcaggtgaacatttatttttaaaacttctatttaaaagaagtccaaaaacatcaacactaaggtttgatgtcatgtgaaaagtgtaataataacagttaagatttcatgatcattttcactggacctttcctgatattttgtttcagagttcttagtgtggctttttccatttatttaagtgattctttgttactcactaactctgcaagcctgtggaataatgaagtaccttcctggaaagtttggattattttttaaacaaaaacaagggagatacatgtattctcaggtacacacagagctgagagggctgaatggttttctgctatagcagccgagaggcctcccatcatggaaagatttctccaggaaaaggaggaatgtagccagctccccactcaggacgcttcctcatttctcttcaccaaaaccaaacagagacagcttccagcaccttcttcagtgttaccatctctaagaaggaaccagttgggaccgtgaagactcccgaccctgtggccatgatggaaatcaaaggaagacaccctctacgtcacctgccctcgactgtgtgtgcccacatgtgccgagagatggcccagagccagttcccctccagctgcaagggcatggtgtccccagagctctgagtctgtcactctccctctgctactgctgctgatctgaatatggaaaccccatggttcccttccccattcggactgggtgtgtacaagcaaggacccagatgcatcagacacagcccccaagatgttcctttctactcggccagctcgggagccagacacagcactcacagcccaggccgtgatccaccctccccaagtccaccagggccagcggcccctcacctctctggtcactggtgagaccttccacaactttcctccagacctgccagcagatgtgcccaccaggggcattaggtatccgccggagcctggccatagggtagtctcgggagccgcgctgagatcttttgccacctgcattttagaagaacatggtctctgtctcctcggcccagccagctgtcccggcaaggcctgccgagggcagttttcaacctcatgaaggaaacacagtcctgccaaggagggggagtggcgcccatggggacaggcctcagtccttagaagccctctgggtagctgtgcccacccagccttcatggctgcaggtacaaggacctttgcttccatagagaaaacgcacagctcagaaagggggccacatgggcagaaacccaaaggaaggacaaaccacgaccaccgtggccatctgcagaatccctggaagagaaggaaggcagggtggagcggggggaagaccatcatggagagaaggaccacagcatcaggagacgggacacgccacacccagcaggcagcctgtgtgttgcttaattttttaagagcaagaggggtagagaggatcaagctggccctggctggagatggctagcccctgagacatgcacttctggttttgaaatgactctgtctgtggggcagcagaaactagagaaggcaagtggctgccccaccccaaggcgtgaccaggaggaacagcctgcagctcactccatgccacacgggtgggccaccagcctgctgtcagaagtctctgggctccaactggtcttgtaaccactgagcactgaaggagagaggtcttggtcagggctggacagcatgcccgggaggaccagcagaggattaaaggtgactgggaggaccagcggaggataaaagacactgctcagggcagggcttctaccctgcatccctggccaagaaaagggcagtccccatgtgggcttgcagggtcactctcaggggcctctttcagctggggctggcaacttgcgtctgggggacacctccaggtgtgtggggtgaggatttcctataaccagggctcccagaagctttgcttatgtaaggaggtctgggagccagcccattggaggccaccagccattttggcttcaaaggaccccacctcacccaggtctcagcggcagtgggcacagctatgtcttcaggagctcccgtcaaacctcatagctggggcgctcccagacaggccagtccagacaggacacgctgggcccctggcatccagaggaagagccaggagtgtgggaaggcccacagtgggggctgtggcttctgacactcaggtcatagcctcagaggtctgaggtcagcccccacagacccatccggcccgccccccaagtccctgcagagagcacttagagttatggcccaggccctggtccacccttcccctgtgcacctccggctgggtttgccaagtcagggagcagggctggccgcaggaactcccaaaccttggctttgaatattgttgtggaggtgtgctcgtccctttctggacgtgcaaggtacctgtcccagcaggtcagatggggccagctgaggcgctcccccaggcaggaagggccagccttcaccatcgcgtgggattgggaggaggggcctccgtgagcagcccctcctctgccgctgtcccagcccagtccctctcccggagccttggcagcctcccacaacccagacacttgcgttcacaagcaacctaaggggcaggtgaagaagcgcagccctgccagacgcgctagattcctctaaggtctctgagatgcaccgttttttaaaaaggcgtggggtgaactgattttgatcttcttgtctagatgcaataaataaatctgaagcatttaatgtagtcatcttgacattgggcctacactgtacgagttccttatgtttccttgagctaaaaatatgtaaataatttttgtcccagtgagaaccgagggttagaaaacctcgatgcctctgagcctcgggaccgctctagggaagtacctgctttcgccagcatgactcatgcttcgtgggtactgaacacgagggtggaaatgaaaactggaacttccttgtaaatttaaacttggcaataaaagagaaaaaaagttaccaagaatgtagcgtgctgctcctgggggctgtggcaggaggccgtggcctggcacaggggaaggttcccagccaatgacccctcatcccggcgcagctgcttggcaggggtgtggtggctggagcccctccctctccctcctccccgcaccaggttccctcccatccccaggttcctaagaggttgtcggggctcatacaacccgggaataactgctaaggggcagttggcaccatcaggaaatgtccccgccctacccctgccgggtacagggagcgtggtccacattctgcatcttttccctgttgggcaggtggctgcccatccaagcctcaggctctgcatctgtggatttggacagccaagccctacctcgcaggacaagcgtagcgagcagcgtcattgttgccaggctgggccgagggaagcaggaaggctccccaccgaggacagaggtgaagtgcgggggtggacatgactcggaaacaccaacgtccaccagcgtgaaaccctgaaatccctggaaacaggatcacaggttctcaaaatctcaccatccagcttaaaccctacccagaaatggcagggaacttctgggtcttgagaggataaccaagttgagtcgagaaagaatgaacaagggacccccttcccccaccgcatgccaagggttggggttatgccaacagaaggaggaagccactgcccagggcagagctgccctcccatgcccccgcctcacccgggtctcaggcctcgtgggcatttacatgtctgagacccgctgggtgacagctcctccctccttgcattcccagcccaggttcaaacccaggggtcgcctggggctggttgagaggctggggccacttctctggtgcccccagagcatgtctgtatatcccctgctctgcggttggaagtggcctgcgtataccggctgctgtcagtgttttccccagggcctcgggagggttcccctcggtagccatgaagcgaagcctcgcagggtccagtgattatgcccaacaggcccagagcgtcctgactctagccggagggcggggccagcaagggcaggtggtagtgacctgcctgcgggtgacctctaggggaagaccgattgccggccagccagctgctggaaacccccttcccccacgtcctactgctctgtggcacttcatggcgttgggaaaaaacccttaacgtctaaagagcttttctccaaaggaaagttggttctgaatcacccatggggtgaaggggcttcctggggattcacttaaggctgcccgatgggcagtgtgaagcttcccttccctccacaggccccggggctgctggccctgctccagccctgggtctacctgccccacttagagaccagccacctgggctcccaggccgtgcgcctgccttggggcccagcctgctctgcaggtccctgcagtcctgacactgcctggctcagtctgacttcctcccagagggcagcacgtgccccctgaacacatgcctgccgcctgcctgtcacctccactgacgcttccttgcccttttttttttttttttttttttgagacggggtcttgctatgttgctcaggccggagtgcactggtgtggtcccagctcgctgcagcctacatctcccagactcaagcaaacctcccaactcagtctcctgagtagctgggcctacaggcaagtgccaccacacctggctttgcttccttgactcttggtttgccctttaaattcaatttttttaagaggaagacttttcgctggaaacagaaaaccagcaccactgcagcattcatttcctagggccgccatgacaaatgatcacaaacagggcagcttaaaacagtagatatttactctcccacagttctgcaggccagtctaaaatcaagttgccagcagggctgctcctcctggaggcttagagggagaagctgcctcctgcctctctcccagctccggtggctccggcacttggcgttcctcgccccatgagtgaatcactccagtccctgcctctccccacagcaccttcttccccgtgtctgtgtcaaatccccctctcctttctcttgaaaggacagcagtcattggatttagggcccgccctgatcgacggtggtcttaactcaagatccttcatttcctctgcaaaaaccctatttccaaataacgtcacattcacagggaccagattcaggacatggacacctttttagaagggctcaccattcaacccattacccttgccagaaattaaagatataaaaacaaatgcagcacaagcaaatccatatcattaaatttttagccaggtcctagcacctgccacaggctctgggcccagccttgcctgtgccattaataggggaggcctattggcgcctaaccaagattttctcagtgataggatcagaagagctaaaacgccgggcatggtggctcatgcctataaccccagcactttgggaggctaaggtgggcagatcacttgaagtcaggagttcgacaccagcctggccaacacggtgaaaccccgtctctactaaaaatacaaaaattaaccaggcctgtggtcccagctactcaggaggctgaaacaggaaaatcgcttgaacccaggaggtggaggttgcagtgagctgagattgcaccattgcacaccagcttgggcaacagagtgagaccctgtctcaaaaaaaaaaaaaaaaaaatgctgacagaagaaaagaaccagctcactctgggactagggtatttaagtctgagtccttgtacccctaaatgtcatcccagatcagagatgccactatgacacacacatatcacagtgtgttgcgaactgtggaattcttttttttttttttttggagacagggtcaagctctgtcaccaaggctggagagcagtggggcggtcatagtttactgcagcttcaacctcctggactcagacgatcctccttcctcagcctcccagagagctgggaccacaggcacatgctgccgctcctggttaatttattaattttttcattgcgagaaggtctcacttgtgcaggctgatctcaaacttctaggctcaaacagtcctcctgcctcagcctcccaaagcactaagacaagaggcgtgagtcacagcgcccagccttgcaattcttatttcagttctccctctccaatagactcacccacaggcaacgactgtgttttattttcacctgttctgtgggagctgggtgcaggctctggcccatgagctctctgtgcatgtatgttggatggatggatggactgatggatggagtcattcttggatacagttccagattcttaaagcctgaattccattcagttctccatgcccatggccctaactttcagcctctccctatgtgtgctcactctggtgtcttccaggccttaccagggccagccaaagatcttcaggagaatttgcccgggccaggttgccaagggtaggagtgtttgagggctttcctctgccaccatcagaaattctgtgtcccccaaccctccacaggtatctgagctgagaccgagctgctgctggtatctcagtgatgagcgagacctcaagcagggtggagtaggtggcagtgcaggctttggagttgctgacgaggttcaagtccctgcaccaatgctccccatccctgtggccttgagtacatggtgaaaccgcatgaggctcaatttcctcatctgtaaaatgggaacctttctggcagtgtccttgcttgtgtagatgaagtgggggcaggtaaatcaagcacctgtacccagcctggcacatgcaatttcagccagggggtctcaccaacggcccagccagaaaaacaggcttcagcccaggcccaggccccctcagttacatgtaccccctcaggtacaaagccagcacctgtggggtacagctgagccctggaattttttaaggtccccagctgatcctcagaggcagctgtgatgattcagtttatgtgtcagcctgactgggctaaggggtgcccagatagcggcatgacatgatttccaagtgtgactgggagggtgtttctgcaagaaagtagaatttgcagtagggtgaggtggctcatgcctgtaatcccagcactttgggaggctgtggtgggtggatcacttgaggtcgggagttcgagaccaacctgaccaacacggtgaaatcctgtctctaccgaaaatacaaaaattagctgggcgtggtggtgggcacctgtagtcccagctactcaggaggctgagacatgagaatcgcttgaacccaggaggcagaggtctgcagtgagccgagattggccactgcagtgagccgagattggccactgcactccagcctgggtgacagagtgagaccctatctcaaaaaaaaaagtgggggctgggggagagagtagcatttgaaagagtagactgagtgaagaagatcaccctcaccactgtgggcggccaccattcaatccattgagggcccaaataaaacaaggaggaaaaaggtaaaatttgctttctgcttgatcccgtatgtccatcttcgcctgcccttggacatcagaggccctggctctcgggccttccagcttggactggaacgacactggctttcctgggcctcccagcttgcagacggcagattctaggaccccttggcctccagaattgcatgagccaattcccataatacagacggcccccaacttataagggttcaactgacaatttttcaaccttatgacaggtttatcgaggtactaaagttgttttcaacttaggatgtgtttattgggatgtagcctcattgtaaattgaggggcatctgtaaatctcatttttaatttaattttattttagaaacagggtctcactctgtcaccgaggctggagtgcagtgttgccatcaaagctcactgcagcctcgaactcccaggctcaagcgatcctgccgcctcagcctccggagcatctgggactacgggcgtgcgccagcacacttggtaatttagttttttttgtctcactatgttgcccaggctgatcttgaactcctggcctaaagtgatcatcctgcctcaggctcccaaagtgctgggattacaggcatgaaccgcagtgcccagcctataaatctatatatctatacctgcctacctatctacctacctatctgtatctcctgttggttctgtttctctgaagaatcctgactgatacagcacccaaaataagaagccagcctggcccacctctgcagcccaccctggctacaccccaccacttggagcacacaagccctctgccctgtcctggaagacccctcaactgattcccctcccaggaccttggcacctgcctttcctccctccagccccctccccaacctctgcacctgcacccatcctctgtcgttatcctccgtccacagaatcagtgttacttccagggactattctgacgtcagacccctgctttcctccatcagcagctgccacccatttctttcctggcgtttgtcacacctcaaaggatttttgtttctttgccatgagcaaaatctcatggctttcgtttggggaacccctgacatcagaggcctgaaaggaggacacagtgcagctggtttatttgggtagtggccccaggaagctggagtgggagctgggagagaagggcaggaggccagtagacagggcacagctggcctggtcaccgccagacactgctgggggcacttgatactcagcctctctggagcccctctgcagagctgcatagatgagccttgggactggtcctgggaggggcaggaggtcaggcatttatcccccaactctcatgccctgttggctgaggactgtcccatgccatgaaggtcctgcttcctcccagctgcctcgcctggagccgagatggctcctgagtgagctcctcatttggacagaaaattggagactcaacaggcacatgggctggaagactggtgggggcctggggacctggagtggatgcagggaggcgctaccagaccccaaacacagtagccacaccccccaaaccagaggttacaaatgggcagcccctgggtccagtgcagcccctctgtgtgttccgtttggccatcaaaggcttttaaaagaaccattgagccaagattttaaacgtcggggatctggtacaaatacctggattcctggcttctctttaaaaatcacatgtgaggatcttgggcccttgtccacctggatagaagtacggaccagtctttggcaggtgtgggctccccaccctgtcagctcccccaacacctgggcctaggggcagactggtgatcggtggctggtacagtattttctccttaccctgaccccttcacctccagtagcccttccgaacccctgggtcaggtgcagggagctcaatatttgattagcccagcccctgtgggtaaactgaggccaccctcctgagcactctccgctgctacccgcatgtcccctccccaagaaggcagctaaaaatattcaagttgctgccctatgggccgagacccagggcctcctcactctctcattccacctccgcctgtgtgcctgcttgggctgcatcctggggacacagaggtgacctgaacacagccattgccctcacaaaggacaggatctaacaacagacaggcagaccatgacttcccagctgtggcatctgcacacagggcacagaaactaacttcttaggcctccatttcctcatctggaaaatgggtcgctccctgggttccctctccccatttgcatgccccagcggatggtaggaaccactccgcttgttcattcaatccccgtgtttgttctttggctccactctgcagcactagctcccgggccaggctgggcgtggcgtagatggaagatggtaaagaagccagctagaaaggcaggaacgcagcgtgacggtgccatacccagagggcctgcctgggcagcccccagaggccttcaaagctacactggagagcttggccgagggaccaatggcaatggcacacactgaagtgttttacacaaaaaaaaccgcctggctggatgtggctggcaagaagatggccggagctgcaggtgacgagtgatcaagaggagcccatggcagtggggacaggtcacagctgaagtgggtgacctgcaacatgttcagcaggtaaaattgacaggtttggtcggactggccacaagggagaggacgggtaaaggacagctcttggtctctggccaggccggcggctcaacaagtgtccaaacaaaccatccgtgtgcccggtgtctacctgagctgccgtcacctcttcctttgccgggtttcatttttctcttttgctgtgttgctgcaactggttgccaaaaggactgcacagctctcctggcaatttggcaaagtctagaacaacagtatttcccataatctcaccattaaaggacaacccttgtggacatcctggcagatttctttctggtcttttttctatgcattttagaattgaaataacacagtgggtgtcatttcatgtcatgcttttgacccagcgtgacatgatatggttcatcatttctccacgatcctggaaactccattttttttttttttttttttgagatggagtctcatgctgttgcctaggcaggagtgcagtggtgccatctcagctcaccgcaacctctgcctcccgggttcaggcaattctcctgcctcagtgtcctgagtagctgggattacaggcatgcaccaacatgcccggctaatttttgtatttttagtagagatgggttttccccatgttgccctgcctcatctcaaactcctgggctcaagcaatttgcccacctcagcctcccaaagtgctgggattacaggtgcgagccactgagtctggccatggaaactccatttctaaagtgtgtaacaagttctgctgcagggaatgtatccctgtggctagctgtgcaccctcgtggtctatccacattttatattacctccccagaagaggtcctgagcatgggaattactagatcatagaaaggtaaaccatcttaagactctggctacaaattgccagattgctttccaaaaatattggaccactgacactctcaccagcgatgtacacaagtgcccatctcaccacagcctccccaccgccaaatgttgtacattttaaatctttcccgatttacagcccagctcagagttcacctcctctgagaagcctcctcagatttcccctctccatcctcgacattcccacagccagcggcccccctccctccacttgtccctagtccatcccagctggaggtctgacgttccagggctggagtctcctctgatccaggtgaggcccccagcagcttcccagcctcaatcagcctgcatattttgagtctcttgtagatggtgggaagccttctagtagtatcatcttcttttacagaacagcaactgagacccagaccagggaggctgagtgactgatcctgagtcacacagctatgaggcagtgttgctgcagctaaaatagcagcaaaaactcccacttaatgggcacttcctccaggccaggcttagctaagcagtttctaagcctaatcggagttcatactcccaataaccttgctgcgctgggactattattatccccatgttacagatggcggacccttgaaccagggccacttggctgagaagcgaagtcccccctgggacttggacctaaaatctgaagtcggcagtgccttgagcaggagtccacgagcctggtccagtgccctgggcctggcatcctttgcctctcacagagcagatacaggcagccaaagacagaaggagcccccaccccacaccgtgaccagggccagagcaggccttgtgccagctccaggtgccacagcagggcacctgccccaccccgcccccaccttgggttgccctgcagattcacaggaacagcctggagcccacccaatctcagtggcttctctcgaacatgcttatctcccaccccttattgacttggggcttttcctgccaatctgcccaagcgggaacagcccttttcagagtaactgctgccaaaatccattggcgcagcgcaccgtctgcctgggccttgatggcatctgtcatgagaggtgggaactagaaagccccatcctcgggcccctccccaggaggcttcagcaggtggagagggaaggcttggcttctcccaggacttgaacattgatccagcaaaacttagctgggcacagtggctcacatctgtaatcccagcacttttgggagtctgaggtgggagaatcacttgagcccaggagtttgagaccagcctgaccaacatggcgaaaccccatctctactaaaaatacaaaaaatagctgggtgtggtggcatgcgcctgtagtcccaactactcaggtggctgaggcatgagaatcgcctgaacacaggagacggaggttgcagtgagctgagatcatgtcactgcactccagcttgggtgatagagtggcactttgtctaaaaaaacaaaaaacaaacaaacaaaaaacgttgactgagcacatactgtgtaccagacactgtacaggtcactagggaggcagcagtaaatgactcagacaagggagggaaggacctcccagcaggggacataggcaacaaagaaaattaaaaataggtaaattctataaaaatacagccaaggaagggggatcagcaggccagtaaggggaagaaaggagctaccgttttaaaccaggaggtcagggaaggttgttctgagaaaggactttgagcagagattgaaggaggtgagtgagagaacctcatggatgtctggggtgacagcaccccaggcagagggaacagccagtgcaaaggccctgg

SEQ ID NO: 267 - DNA, 6809 bp, Homo sapiens
agtgctgggctgtgggccggggaggaaggcggctcgcggttcctccaccgcctccgccgccgcatcctccgcttgtgctaccgccgcgggcgctgggccgctctgctggtccggcatgagaccgtgagacgagagacgggtcggggccgccgacatgtttggccgctcgcggagctgggtgggcgggggccatggcaagacttcccgcaacatccactccttggaccacctcaagtatctgtaccacgttttgaccaaaaacaccacagtcacagaacagaaccggaacctgctagtggagaccatccgttccatcactgagatcctgatctggggagatcaaaatgacagctctgtatttgacttcttcctggagaagaatatgtttgttttcttcttgaacatcttgcggcaaaagtcgggccgttacgtgtgcgttcagctgctgcagaccttgaacatcctctttgagaacatcagtcacgagacctcactttattatttgctctcaaataactacgtaaattctatcatcgttcataaatttgacttttctgatgaggagattatggcctattatatatcgttcctgaaaacactttcgttaaaactcaacaaccacactgtccatttcttttataatgagcacaccaatgactttgccctgtacacagaagccatcaagtttttcaaccaccctgaaagcatggttagaattgctgtaagaaccataactttgaatgtctataaagtggataaccaggccatgctgcactacatccgagataaaactgctgttccttacttctccaatttggtctggttcattgggagccatgtgatcgaactcgatgactgcgtgcagactgatgaggagcatcggaatcggggtaaactgagtgatctggtggcagagcacctagaccacctgcactatctcaatgacatcctgatcatcaactgtgagttcctcaacgatgtgctcactgaccacctgctcaacaggctcttcctgcccctctacgtgtactcactggagaaccaggacaagggaggagaacggccgaaaattagcctgccggtgtctctttatcttctgtcacaggtcttcttaattatacatcatgcaccgctggtgaactcgttagctgaagtcattctgaatggtgatctgtctgagatgtacgctaagactgaacaggatattcagagaagttctgccaagcccagcattcggtgcttcattaaacccaccgagacactcgagcggtcccttgagatgaacaagcacaagggcaagaggcgggtgcaaaagagacccaactacaaaaacgttggggaagaagaagatgaggagaaagggcccaccgaggatgcccaagaagacgccgagaaggctaaaggtacagagggtggttcaaaaggcatcaagacgagtggggagagtgaagagatcgagatggtgatcatggagcgtagcaagctctcagagctggccgccagcacctccgtgcaggagcagaacaccacggacgaggagaaaagcgccgccgccacctgctctgagagcacgcaatggagcagacccttcctggatatggtgtaccacgcgctggacagcccggatgatgattaccatgccctgttcgtgctctgcctcctctatgccatgtctcataataaaggcatggatcctgaaaaattagagcgaatccagctccccgtgccaaatgcggccgagaagaccacctacaaccacccgctagctgaaagactcatcaggatcatgaacaacgctgcccagccagatgggaagatccggctggcgacgctggagctgagctgcctgcttctgaagcagcaagtcctgatgagtgctggctgcatcatgaaggacgtgcacctggcctgcctggagggtgcgagagaagaaagtgttcaccttgtacgacatttttataagggagaagacatttttttggacatgtttgaagatgagtataggagcatgacaatgaagcccatgaacgtggaatatctcatgatggacgcctccatcctgctgcccccaacaggcacgccactgacgggcattgacttcgtgaagcggctgccgtgtggcgatgtggagaagacccggcgggccatccgggtgttcttcatgctgcgttccctgtcactgcaattgcgaggggagcctgagacacagttgccgctgactcgggaggaggacctgatcaagactgatgatgtcctggatctgaataacagcgacttgattgcatgtacagtgatcaccaaggatggcggcatggtccagcgattcctggctgtggatatttaccagatgagtttggtggagcctgatgtgtccaggcttggctggggagtggtcaagtttgcaggcctattgcaggacatgcaggtgactggcgtggaggacgacagccgtgccctgaacatcaccatccacaagcctgcgtccagcccccattccaagcccttccccatcctccaggccaccttcatcttctcagaccacatccgctgcatcatcgccaagcagcgcctggccaaaggccgcatccaggcaaggcgcatgaagatgcagagaatagctgccctcctggacctcccaatccagcccaccactgaagtcctggggtttggactcggctcctccacctccactcagcacctgcctttccgcttctacgaccaggggcgccggggcagcagcgaccccacagtgcagcgctccgtgtttgcatcggtggacaaggtgccaggcttcgccgtggcccagtgcataaaccagcacagctccccgtccctgtcctcacagtcgccaccctccgccagcgggagccccagcggcagcgggagcaccagccactgcgactctggaggcaccagctcgtcctccaccccctccacagcccagagtccagcagatgcccccatgagtccagaactgcctaagcctcaccttcctgaccagttggtaatcgtcaacgaaacggaagcagactctaagcccagcaagaacgtggccaggagcgcagccgtggagacagccagcctgtcccccagcctcgtccctgcccggcagcccaccatttccctgctctgcgaggacacggctgacacgctgagcgtcgaatcgctgacccttgtccccccagttgacccccacagcctccgcagcctcaccggcatgcccccgctgtccacgccggctgccgcctgcacagagcccgtgggcgaagaggctgcatgtgctgagcctgtgggcaccgctgaggactgagtcagtgccggggcctccctttgtgtgtgtggccccgctggtagggaccccagtgccgctgactggcaagacacactgggagcacccaccattctgtgcggcccccagcagccatctcaaccacctatccctgcgctcccttgaatgggaagaagccccacgttgtccttgaattcctttttcactttgcatctcttcacgtgcaggctgggaccagcggagacaccgcggcgaatgcagatgactgcaccggccactcagggagctgcctgggctccgtgtctctgagccccgggtggcaggacccaccggcacctctttcttcctctgtcatatggctcctctgtcaccagccccagtgtgcacagaagaattggaccaggtcactgtacgtagaaatttgtagaaaagcagacttagataaacatctcctttggatatttatttccgcttttggcagcaggtgaacatttatttttaaaacttctatttaaaagaagtccaaaaacatcaacactaaggtttgatgtcatgtgaaaagtgtaataataacagttaagatttcatgatcattttcactggacctttcctgatattttgtttcagagttcttagtgtggctttttccatttatttaagtgattctttgttactcactaactctgcaagcctgtggaataatgaagtaccttcctggaaagtttggattattttttaaacaaaaacaagggagatacatgtattctcaggtacacacagagctgagagggctgaatggttttctgctatagcagccgagaggcctcccatcatggaaagatttctccaggaaaaggaggaatgtagccagctccccactcaggacgcttcctcatttctcttcaccaaaaccaaacagagacagcttccagcaccttcttcagtgttaccatctctaagaaggaaccagttgggaccgtgaagactcccgaccctgtggccatgatggaaatcaaaggaagacaccctctacgtcacctgccctcgactgtgtgtgcccacatgtgccgagagatggcccagagccagttcccctccagctgcaagggcatggtgtccccagagctctgagtctgtcactctccctctgctactgctgctgatctgaatatggaaaccccatggttcccttccccattcggactgggtgtgtacaagcaaggacccagatgcatcagacacagcccccaagatgttcctttctactcggccagctcgggagccagacacagcactcacagcccaggccgtgatccaccctccccaagtccaccagggccagcggcccctcacctctctggtcactggtgagaccttccacaactttcctccagacctgccagcagatgtgcccaccaggggcattaggtatccgccggagcctggccatagggtagtctcgggagccgcgctgagatcttttgccacctgcattttagaagaacatggtctctgtctcctcggcccagccagctgtcccggcaaggcctgccgagggcagttttcaacctcatgaaggaaacacagtcctgccaaggagggggagtggcgcccatggggacaggcctcagtccttagaagccctctgggtagctgtgcccacccagccttcatggctgcaggtacaaggacctttgcttccatagagaaaacgcacagctcagaaagggggccacatgggcagaaacccaaaggaaggacaaaccacgaccaccgtggccatctgcagaatccctggaagagaaggaaggcagggtggagcggggggaagaccatcatggagagaaggaccacagcatcaggagacgggacacgccacacccagcaggcagcctgtgtgttgcttaattttttaagagcaagaggggtagagaggatcaagctggccctggctggagatggctagcccctgagacatgcacttctggttttgaaatgactctgtctgtggggcagcagaaactagagaaggcaagtggctgccccaccccaaggcgtgaccaggaggaacagcctgcagctcactccatgccacacgggtgggccaccagcctgctgtcagaagtctctgggctccaactggtcttgtaaccactgagcactgaaggagagaggtcttggtcagggctggacagcatgcccgggaggaccagcagaggattaaaggtgactgggaggaccagcggaggataaaagacactgctcagggcagggcttctaccctgcatccctggccaagaaaagggcagtccccatgtgggcttgcagggtcactctcaggggcctctttcagctggggctggcaacttgcgtctgggggacacctccaggtgtgtggggtgaggatttcctataaccagggctcccagaagctttgcttatgtaaggaggtctgggagccagcccattggaggccaccagccattttggcttcaaaggaccccacctcacccaggtctcagcggcagtgggcacagctatgtcttcaggagctcccgtcaaacctcatagctggggcgctcccagacaggccagtccagacaggacacgctgggcccctggcatccagaggaagagccaggagtgtgggaaggcccacagtgggggctgtggcttctgacactcaggtcatagcctcagaggtctgaggtcagcccccacagacccatccggcccgccccccaagtccctgcagagagcacttagagttatggcccaggccctggtccacccttcccctgtgcacctccggctgggtttgccaagtcagggagcagggctggccgcaggaactcccaaaccttggctttgaatattgttgtggaggtgtgctcgtccctttctggacgtgcaaggtacctgtcccagcaggtcagatggggccagctgaggcgctcccccaggcaggaagggccagccttcaccatcgcgtgggattgggaggaggggcctccgtgagcagcccctcctctgccgctgtcccagcccagtccctctcccggagccttggcagcctcccacaacccagacacttgcgttcacaagcaacctaaggggcaggtgaagaagcgcagccctgccagacgcgctagattcctctaaggtctctgagatgcaccgttttttaaaaaggcgtggggtgaactgattttgatcttcttgtctagatgcaataaataaatctgaagcatttaatgtagtcatcttgacattgggcctacactgtacgagttccttatgtttccttgagctaaaaatatgtaaataatttttgtcccagtgagaaccgagggttagaaaacctcgatgcctctgagcctcgggaccgctctagggaagtacctgctttcgccagcatgactcatgcttcgtgggtactgaacacgagggtggaaatgaaaactggaacttccttgtaaatttaaacttggcaataaaagagaaaaaaagttaccaagaa

SEQ ID NO: 268 - protein, 1051 aa, Homo sapiens
MFGRSRSWVGGGHGKTSRNIHSLDHLKYLYHVLTKNTTVTEQNRNLLVETIRSITEILIWGDQNDSSVFDFFLEKNMFVFFLNILRQKSGRYVCVQLLQTLNILFENISHETSLYYLLSNNYVNSIIVHKFDFSDEEIMAYYISFLKTLSLKLNNHTVHFFYNEHTNDFALYTEAIKFFNHPESMVRIAVRTITLNVYKVDNQAMLHYIRDKTAVPYFSNLVWFIGSHVIELDDCVQTDEEHRNRGKLSDLVAEHLDHLHYLNDILIINCEFLNDVLTDHLLNRLFLPLYVYSLENQDKGGERPKISLPVSLYLLSQVFLIIHHAPLVNSLAEVILNGDLSEMYAKTEQDIQRSSAKPSIRCFIKPTETLERSLEMNKHKGKRRVQKRPNYKNVGEEEDEEKGPTEDAQEDAEKAKGTEGGSKGIKTSGESEEIEMVIMERSKLSELAASTSVQEQNTTDEEKSAAATCSESTQWSRPFLDMVYHALDSPDDDYHALFVLCLLYAMSHNKGMDPEKLERIQLPVPNAAEKTTYNHPLAERLIRIMNNAAQPDGKIRLATLELSCLLLKQQVLMSAGCIMKDVHLACLEGAREESVHLVRHFYKGEDIFLDMFEDEYRSMTMKPMNVEYLMMDASILLPPTGTPLTGIDFVKRLPCGDVEKTRRAIRVFFMLRSLSLQLRGEPETQLPLTREEDLIKTDDVLDLNNSDLIACTVITKDGGMVQRFLAVDIYQMSLVEPDVSRLGWGVVKFAGLLQDMQVTGVEDDSRALNITIHKPASSPHSKPFPILQATFIFSDHIRCIIAKQRLAKGRIQARRMKMQRIAALLDLPIQPTTEVLGFGLGSSTSTQHLPFRFYDQGRRGSSDPTVQRSVFASVDKVPGFAVAQCINQHSSPSLSSQSPPSASGSPSGSGSTSHCDSGGTSSSSTPSTAQSPADAPMSPELPKPHLPDQLVIVNETEADSKPSKNVARSAAVETASLSPSLVPARQPTISLLCEDTADTLSVESLTLVPPVDPHSLRSLTGMPPLSTPAAACTEPVGEEAACAEPVGTAED

SEQ ID NO: 269 - DNA, 21930 bp, Mus musculus
ccttacagggcaattggggtcctgccttcagctgaagggctttgtccacaaggcctcagtggactggcaggacagagggctggaactgaataatgttcccagggtgcctctgcccctccctgagaaggcccgtctgcctgtgacacagccagcccaccctcaatctgaagtgcagaagaggacagtagtgagtgctcaggccgaggcatggagacaccaacccagtgctccctaaggttataagcagcaggggtgatagggctcctcccagggtaggacacagctgttaaacaggaatgggtcccaaaagaccagggaacatcttggtccctcagtccccgcccttgaacgttggcaggtattcccaaggtggaagttccctgccatacagtccgggcactgatgaaaggcagttcaaggctgaaagctatatagctgagttagggtcactgtggccctgactcctgccataaccatgggtaaagagtaggaacccagtggacagggctaacaggtacacacagctatgctgggaaaggctgcttcatgcttggaagctagggaaaggagttgagagttgcaagccttttgcccagcccaggggtggggagtggaggacttgatagaatgagcatcccagtaggcctgggcctttggggaagcctggcagtttttgtggagacagtcatgagtcctaggtggaacacatggcagtgagaagtcagtgcaaagtagatgaggccacgtatagatagatgaggtgtagaagcctctagctgtacttgagcagactgatctcggtgggcacaaatatcccagtcctcaacagagaaaggtgcccccccccccacacacacacaccttgcccccaagcaacaaagcctacttctctctccaccaggaggctgcccctgctaccaggccccgacactctcaaactccaccttggccgaggtggtaaagtggcactagctttcctgaggtctgctcccaagaagcatctgagaagatggatgagagtcatgctcttcccctccctcccacattttctgtataaccttgggcaagttacctaacctcaactccctaatctgagaaatagggttaaaagaatacacaccactaggctgcatagctgaaatgacctgactcctgtagggaggaacatagcatctggcaacctcactgagggttgcttttcttgagttgcaggaagtgccttgcagtttccccaggtgcttgatgctactgagacatgaaaagcccagcaactgcccaagaggagttccatctatggtcacagtgataccatcagtcactgtacttacaaagaggcccatgattcataggaagagccatagctatgtatgattgcccttgactgtccccagatcctcttggtctggggatctgatcaggcctctaggctggtgaccactgcctctctggatagcagtgaaggcagagatatgtgatgtgggtctttgatcaagatgctatgcagaacaaacccaacttacagaatgggactttacctcttcttaaaaccctggagacagacagagcttatacagggaagaattccaggaggtgacttaagtttgcagatctgcggcacacactcctcatagaactgtgccaggaggaacaatagcctcagagtgaggacagggcttagacaagcccacagagggacagagcaggaccgcaagctgatattttgtgacccattctaaattctgtggagctcctcttacagctgtataggtacaccctgagattttctatgtatgcccctgtgcaggtgataaaatggcaaatcatagtttaatatccaaagaaatcacactttaatagttgaaaaatgcttgtttcctgcattctaaaaaaaaccccaaactttaagtagagaatcaagaaattcagagtccaagcttgcatatctgagccgtgccccagcccagtgactgtctcattttaggcaaataaaagaattcttgctttcctttgtatccctcccagcactcagaaaacagtctcagtttaagatttcaatttttttttttgatgctggcttttaatttcctgtttcacagattcttggacttataaattcgtaggtctaaagcatagaattagagtctgaggaacacctagtagcctcttcaagatctgggaccacctagacacaggacaaagaatggagatactggcactgcacctcctaaaaggacagtgggaaaagcactggggcgtggtcctgtaacgtacaacgtcctactctgtcctggcaatacccaagaagagcattctcccttctgatctggttgtggcaagccctgagcccccagagtggcctttaacaccgatgtcacatttgtcttctcagtggaatgtcagtcacctatcctccatgtcaccggcctaagtaaactatgctccaaaggcattatcttaagtgaccccaggagacaagccaccctttggtcctcagcctaactgaaatacctacctcactagcctgactaccagagcagcgcagcctcctaacgctcccaggcgttgggaaggttttcaagcactggatcgtaagaggacagctcagactgtctggccagcctgcacaaaggccctcacagacctacggaggctggccacgtgccaggtcctctccatcaagtcaccagctcctcaggtgtctgggagattctcccggtgttccaaaaggaaaaacaatacgcctgcctccatgatccaaaagctgatccggacagagatgaacacatgagagaggctgtgcccgcctcgacatgcagcatggagagcacagaccgtttggtgtgcgagcgagggctcttggaattcacttctggaagaagtgctacctagcgctctccacggtttcggaaacacgggaggatgggaagcacggcctccgacacagagacaccaccgtaagccggagcaaggcagctcttacgccaggcggcgcttgttgatgacatcacaaggacgcaccttatagtcaggggccgcgcaggcgttctgccggctgccgcgggcgcagggattgcgctgatataaccacctgactaccggagcttgcagtttcgctctcggccgccagtctaatctggaagcgcctcgtagacactccccgtcctatggtttttcccgagctcgcttgcaagccccaccacactggccagctcaaccgccacagtccaccctccggagtgcgaggacgcacgcccctggcaactcctaacccctcagtttgaggggacactccccactaagtcccagaattccgcccccccccccgtggttccttctggccatgctttctggctttctctctatgctgtgtgattctaactgcccctaaggtcgtgtgtaacccacgtgcagatcaggaacctaatcctttttcctgaaatacctctcaccctgttcgtcttcctgtgcgctcatatccaaactcactgatgaccacgcggctcttccccagtgtcccccctctacggagactagcttggaaactcattgctcactattaaacgaaggaaggaaaaacagcttatcgttgcggtcctctggatcttatggtctagtgccgattggggtacagggtatctctgaataccttgctctgggtaatgtggtagctacaggaggaagttaagttgctatggaaggcagtagtgtgcacaggctgcactgctggacctgctgcatgtttattttgacctggccctgtctcctatgggccagcgtcattgatcagatgaaaagagctgcacaatgggaggtatgtgcaccttcctgggaaacccaaactaggaaaactggagccttgctgcagcttgggtctataaaggggcaaggaaagttcttccttttgtcaggaacagaaagggcaagaggcagtatgctgtataacctgctggtccccagaaagggatagcaatgaacaaaagaccagtcaggtttcacactcagcagctgcccagatccaccccaagtggcactttgggatctgcctctgaacatgcgactgctggggaaactgagacccgctagctggccctaggtctgtccagctcaggaatgttccctgcttgtgacaattgagcgaccaaagcagattaacctgggtgttaatcccctctaatggtttcagaatcctcgatgcgaggcgctaagccggcctttctccaaggcctgcagaagcccttcccaaagccttcgcctgcagccgcgccgatgctatctcagccccgcctggcagcgaacccgctctaatcccctgtgctctctttcttcccctgcctgcctgagatgaggccgattggcgtttgattaccgcgctatcgaggaccctttgtgcaatcggccccaaatcccctaattctgtgataaaggctgcattagcagacgtttgctgtagaaaaggcactggcatgaaagaatgcaatcaggggaatcctgatggcctggcgcaagcctgttagtgagtgaggacaacaaggagagggggatgcctccattctacaggacaggggaggggtggcgaggcccaggagagggagggcatcgtgtcctgggtatctccaatccatcttcctcagctctgaatgtttgggctgcaagaggagggtccaccccacctccagcctcaccatcgcactttcaagaccttggctttggatatatagaatggtggtgcctaccttgaaacgcagggttaggagagaaaagtggctggaaatgagttaggaggctattcctgggctggcgtattggctcctgcctctatcccaatgcctgagaggtagaggcaggagaatctaggttagtaagctacatagtgaattcaagaccaacttgggttatataagacctcatctcaaaaaaaaacaaaataaagctaaacaagcagaacaaaataaaacattcatcaaagaaaatggcagatggcagagactcctaaaatggcaccgctaaggtcagcagcaggtaggactggaaaaggccagaggtggggagggaagagtggtgagtgtggtcctagggttgaggggtcggcagctccagggataggtaagagtttcccaagggatgcaggtgggctggagggctcttcacctgggtgggcaagtgtgcacttaataacataaagacagctgacatgttaatttactgaagtgtgggaaaaaaaaaaaagtcaggccatatcaaggaggacacgtggctctgtccagagctgactcatcagccctctagctggtgaccttgggtcattacctgaatgacagagccacccaaaccctgaacagaacttgctatggctctagagatcccaaaaggctggctctgatttcaaggtgggtcacagatgaagtccacggacttctgtctggagactggtcctgcagatgccttctgcttagttgtctccctcccctgtcttatcaggtagccctgttcttcccagggtgaccaatcaactcagtcagtgttctttgatcaaatgaacttcccaaaagaacaggacattggacactaaaagtgcagaatccctggggaagctgggattcctagttcacctgtgtttgtgcatccctcaaagaggtatattaaaagtgtaaccccagggctggtgagatggctcagtgggtaagagcacccgactgctcttccgaaggtccagagttcaaatcccagcaaccacatggtggctcacaaccatccgtaatgagatctgactccctcttctggagtgtctgaagacagctacagtgtacttacatataataaataaatcttttttaaaaaaagtgtaaccccagggacctgtgaaattgcaaatatgacctttctagctgcagtaacagtaagattaattaggatgaggtcttactggacatgctaagtgctctaccaccaagctggatctcattgccagtccttccccctcccaccccaccccccacttagactcctgagtgctgggataaaaggcatctagctttctcaggcatgctatgtgtttatttattattctcctttttagctcattggtgtctctctggtaaaaataaatccctcatagttaagtattatattttaaaaacttcaacttgagccaatgttagtggcacatgaccgtaatcttagcatttgggaactggaggtaggggatcaaattcaaggccagtcttggtcgtgtggtaagtgtgagaccagtttaggttacaatcgtaggaccttgtctcaaaccaaagaagtggccaagcttgtgcttgtgaccttgggttcaatcaccaaagcacactaaaaagggctgaaccccggggtggggagggggtaggcatatggcttagtggtagagcattcacctagcatggtcaaggccatgggttctattcctagcacccacacacagagatggaggtggtattaaaccatatcttacttatatacaaaaattagcttaaatggatcaatgtaagagttataaaacatagagtttataaaattataggctgcaatacccctgccccaatttccactgcaggagatagaacctaggactttgtgactgctaaacaagtattctcccatctgaagtagatccccagcccctaccagtaaatcttggttataacagtggcttcttagatatggcaccaacaacatacacaaccaaagacaaaataaatttggtttattccattttaaaaatatttttgttcttttcttgttgttcagtaatttcctccaaagtctttttgggacctaggaagttctaaatgaggaaacttcaaagggaaccttgttaagacaaagggaggaaacaattcaaaagtctcaggaagttgctgaaactaacaagattcacaaggcctctccctacccatgatgctagaagcaataagagctactgagaaaacagcagatgactggttatttctccactgctgaaatgaactaattcaagccagattagattatattaaaggcaggttcattgggccctggtttctggcgggagagttcgctggccccaaggaccaaggccagggacatcaccatagggaaaggagaataggggagggagagaaaggagcagagagggaagagaagagagggagagagcatgcaagtgagtgcaaaatgtctggactatatagggaggaacctatgggagaagggcagcccattcccctggctggaaagtttagggttggggggggggcagagtatgccaggtagggactgagggatgctgggagaacctggaggccaggtctggtttggtatcccttgctccccatctgaaaccaaacaaagacctgcaacttttaagagctgtcacccaccaggcagtggtggcgcacgcctttaatatcaccacttgggaggcagaggcaggtggatttctgagctcaaggccagcctggtctatagagtgagttctgggacagccaggactgcaaagagaaacccttactcaaaaaaaaaaaaaaagaaaaaaagagctgtcactcatgcaggacaggacatttggtcactgcattagttacgtgtctattactgtgataaaacatgatggggcaaagtgcaaaaggagggtttctgggcttacagttttagaggaataagagttcattcctatcatggcttttaaacctcaaaacccacgctcagtgatgtaaatccttcagcaagaccacacctcctaaacctatgcaaacagcaccacctctgttatcaaatattattgaacatctgagcctatgggggccggtgtcgttcaatccaccacagtggtacagctttgagtcatttctgttgctgtaacctcagccatattcctagtaaccctaccaagttagacctcagtagtgctcttactttggctatcactgcttccctacttggggtgagtagatgtttgtttacttgatactttcagaaatagtgtcacaagacactattacacacacacacacacacacacacacacacacacacacacacacacagtggtattgccccagtcgtctctaagcaagttcagaagacacaaatgagccacatgcacaaatgactgccaccaagtgcacagagcctggctcactgacacctcaatatggtcctgacaatatggtcaatatggtccattgagggagaactccccaagggcacagctttggcagagcaccatgtcatcttcctacagggagagaaatacaagagaaaggaagcaaggctatgggcatggaaagaggaagaaatcccagaggccttcctgtccctggccttgctgccccattctgagcagacaagagtaacgggccacttcacacccctgagcattgaggtgggtttaggcacagatgttctacacgaatgtctgctagacaagtcttctgcatccaaaggaatccataggaggtctggggctgtggcagccattctgtaaccatgaggcaggctgaaaggtcacacagttaatagtgctactcataagcctttcagatgaacacactctgggacttttatgatggatgagacagtaatgtccatcacttgaagcccatagagtcctcactggtactagagtgtagtcagcagaagaacttataagaggacttggtaaagtgggagatgggtgactgggtatgctgcctactctggctgctaatattcctgggacatcaaccccatgtccagttgtgctctggatatctcacacccagtaactgcttaaaccctaagaacaaatcattttttcctttgagacagggtcttgccctgtagctctgactagccaggaactcacaaagatctgtctgcttctgcctctcaaatgctaggattaaaggtatcatcatgccttaaaaaaaaaaaaaaaaaatacagatctcaccagactggcctttccctcacagtaatcctcctgtctcggcctctggagcccctggaatcctgcgactatagatttggctcaccattctcaacgcttgtccccttaggaagaacccttgatagttgatcagtattatgacattaaacaagccacaatgcttagtaacagtgaggcagtccgctgctctgtcctgaaagacacacgccatattttcagagatcacaaaacaaagtgtcttaagcaaaggcctagaggttcaaagcttcataattgagaatgacgaaaatcgggccaagtatttgttctcagttggaaagaacagtgggcagaagttatattgtagacaaagcggaactggcctgggcaaagggtagggcaggggcacatgaaacagctcttagaaaatgtggtgtgagggagatgttgatgtacacaggagccgggcaagggcgtcagggaccttctaagacaggagataacaagaaaaatatcttctagtctctagaaagaaggcacagaattggcagctcgcgcctttgctcccagcactcaggagacaagaagcaggcgaatctttatgagttggatgtcagtctcagcttcccatcctgtaggtattcttctataggagattcagaccagggcttcaaagtgagcaagagctgtcaagtagggtcatcctgctgacagggtgctgagctcactggaaatcttcattccaggaatctccagtttcatggagggaatgagggaagccaggggcagagaggtggcggggaccctgtgagttagaggcttccaaggtcctggcattcctcctggcaggcgaccttaagcctgccttaaaagatataaaggatgggctcctgatcccttcctttccctccagctctagacgtggcagagtgcaggactccctgctcccagcgcagtccccggtacccagacgaaggggcttgccctcctccatggccggggattagctctctgaggactggcgacgggattagcacgcgcgaacgcggcgcccggtctggggattaccgcacctcccacctccctatgtatatattccgcctcttgcgccgcccgcccgcgggcatggcgactgcaggcagcgcggccagccgcagggaccccgggcgaccctgccctttctccatcgagcacatcctctccagcctgccggagcgcaggcccgcgacgcggccaccgcagcccgtcggtggtcggaaccccgccgagctagacgaacccgaggcgcccgtccccgctgctccttgcgcctgctgctgctgctgcaacccgcgcgctgcgacccgcggaaccccggagacatcgtccgggccgggtgagtgcgcgcggaggggcaagactaggcggggatctcgcggggcggcctgcggggcgagcctggctccccctaaccctaattggaaccgtaaccctacacctgaccccaccccgccccttaccgccccgcaggcttgcggctggcgtggccgctgaggttggcgcccgccacgccctctcccttgacggcgcctagagcaggctccccggcgctgactggcacgagcggccccggcccgcagaggcgcacgcggcgccaccgtaccatcttcagcgaggagcagctgcaggcgctcgaggcactcttcgtacagaaccagtatcccgacgtaggcacacgcgaacgcttggcggtccgcatccgcctgcgagaggagcgcgtggaggtgggtgttcagcccgcagcctggaggccaactccggcgccactcttatttttcaaagaccgaccttccagaaggggcttcaactcgtagccggctacactgaagggagaccccctatgatcactcgatgagggcgcggggccggttcttccagcacgttatttgggtgtccctggaactggaagaggtcaagagtcgttttctttgactttgtccggctccccagtttcccctgatgatgaaatgcacgtttgttcctgccccagatgtgagaaagttaagaaatgttcaaatctagtcaggcatagtggcatgtatctgtaatcccaacccctgggggatggaggctggatcatgagttcatcaaagtcagtctcctcacacagtaagaagccgcctagccacctaggttacaaggaggagaggtggggtgggaagaaggggagagaggagagagagagagagagagagagagagagagagagagcgcgcctgagcctgggctcaggctgggaaagtgtgtgagggaaggaggttgcagatccattcacctacacctccattgaagcctaccacctagcccttccaaagttctttggatgatggatccttggggcctgagctgtcctggtctccctcctcctcaggtctggttcaagaaccgccgggcaaagtggcgacaccaaaagcgtgcttcctcatcgaggctcctgcctgggactaagaaaactcccaaggagagttgttgatgctgtccggagtttatctggctttatgaagtagagcacaaggaaggaggagggggacagacctacctgaacaggaactaacgctgccagcactggcagccaggggatccaaagccgccttctcacccatgaagggagggcatgtggggcaggaaccagagacctcctgcaggtcaagtgcagacacagagcaggtcaacttcctcagccaccctcagcacctagagaagccctagctccatgcaggacgaagagcctaactccccacctcatgcctgtcaccaagactggcctcttctctgtccttccaccttcttatgcaaggcagtggtgtctgctcagccctgggcgtactctgtcctcacaggccctgcactttagggccctggtgtcatgacctgtggaagaagaaggttgtagttggtagtttccagattcctgcatctgctccttcacctcagccttgagctgatgccaagaaataaacgagatcttcaaagaccacagaacagtccaggatttcaagtccctgtgtctcaggctttgtttccacaccaactgagggactggctccattgtccctttccagagagtttgggggtggggtgtggatcaacatgtgttgcagagcacagctcaacaagtacccagtcccagtaccatgtctccctcgtcagaattaaagccggtagatggtggcaaggcctcctggggatctgggcctctaggcactaccaaccagcttcacagatggggggaatctttggctgtgtgtgtggatgtatgtgtgtgagtgcatagctgtgtgtgttgcctgtatatatacatgtacatcacatgtttgcctggtgcccatggagatcagaagaggatatttgaatccctgaaagtagagttatggatagttgtgtgtcactgtgtgggtgctgggaactgaacctagatcctcgagaagagcaacaaatgcttgtaacggatgagccatctcttctgccccctccatactcttcttggtgtatcttttccatccttaggctacagttcccacctctatgtctccagtccaggcctgtcccctgaggtatttgtcagtctgtacctctgacaacacctggaagcccacaggcttgcggcaggcaccatatatacaacaggccattttcccattcactgtcctgctaaaggcacgttaaatcatagagttcttgatcattaattgctattattaccggatcatacccagtccagccgatttcacctttaaacatatcaataaccccccagaaactagctcgtgtgcagcttcaggcgcaccaacctcatgaaagctgcattcccttgcatggtaaccattgcagctttctctggttttcacctgagctcacttaaaataatgtttcttgacaggactccaaagatactgtgcagcctggctctccccctctggtgtcatctccttctttagcgcactgtgtgactaaaggtctgttttggcatttgccttgctccaccccgctgctgggccttcccattgcctgatgcccatccattcatcttttccatctacaaccatgttctgcctggggaaatgccacttgacatgtcctgtgtagcagttgagattctctgagtgcagacttattgcaggtcacagttgtaactttacacactggcagcatgatttaacatttttctactgtatggtcaactctatggatgcagggacatggtcataaagtccccagtgactcacaatgaaggacaagatcattggaaaagcaaaattgtaatgaatcattctgggctagagcttctcccacctaattcatgatctcccttaggaagaaagttccactaatgctttcagtgagaagcccatcctggcagacagggaactaataaatccaaccagagatttaagacccttttgttctttcttttcatttaaattttgttagataagtatacgggaagaattgtcttagtgttctttttctgagtttggaagtcataaccaaattttttgaagtatttaaaaatgtctttgaagcatctgcatttttttttttttttaaagaattggaacttttaacagagggactgtggcgtcagtcactctacagctccccctagtgatcatagtctagatgggcatgagcaacgcgggtggggataaaagactacaactttcttaagatccggcgctcccagtgacatcattggagcgccggctttgttacaaaaatactgcttctccattggctggctgttggagcggtgcagacgccgcccgagcgattctgggatagcgatggggacgcccgggacctcggcgggtgctctgtttctgtcctccgcgtccgcgccctcaaggaagcgcgcggctggggaggctggagaggccggagttgcgagaagcaggcagcgggtcctggatgaagaagagtacatcgaggtaccagctcagtgcgagcgctggcgacttccgggcccctccccctattcgcgttcctgtccagtcctttgaattttttctggtcctggcactctcagccgcccttggaagtggaacaactgtttttgggttggaaagcattgagaaccaagaaaacaatgcagaagtgggcatccagttttctgttgagagtcaaggaaatagtttcttgtataggtagaattttgacacgtttttcgagagatggtgaagacgactttttggaaggctgtaaagtgtcaaaggctgggggtcccggaattagacagtggaactggcttcgtcattgagtgagtgggtctcagttgctcctcgagttaagggtccaactgcaaacacgctggaggacagaccgacatagggttggttttagactggttagatttaggatgcttctgggatatgctgccttgtaccattgccgtgcagctgactgtacagactttcagcttcacagcaagggcgggctggatctgaaatcttgaggactttttcttgtggtggcgatagtggcgactggctttcaagagaaaggtttagattgaaatacaaattcatgggtgggtggaggatgacaatatccacattagtctggctggtgttatagatggagccagcaaagagaaagatcagttagtgagggatttcatgggcttcaagagattgttcagtagttaactggtacatcagagctatgtgggatgacagccttactagaaaagacagttctaaacctatcttgtagatgacagttgtccagctaggcagaagggaaaggtctaaggggtggaacatggacagtggtggattgtgcgtcaggactcccagatgacaactctggcctttgttctgattgctcatggcagggacttcagacagttatccagagagacttcttccctgatgtggagaagctacaggcacagaaggagtacctggaggccgaggaaaacggagatttggagcgcatgcgccagattgccatcaagtttggctctgccctgggcaagatatctcgggaacctccaccaccctgtaagaggacgggtgctgctttagagggcttagggaaagtctgttatcacgtaaggctcactctaatttctgatttgcttctctcagatgttactccagccacctttgaaactcctgaggtacacccaggctctgctgtgctgggcaacaagccccggccccagggccgagacctagatgatggtgagtgaactccctcttttagtctcatagtcaagactacttgggaattgtattcttgtgaattttctttttttttttttttttttttttttttttttttttggtttttcgagacagggtttctctgtgtagccctggctgtcctggaactcactctgtagacccaggctggccttgaactcagaaatccgcctgcctctgcctcccgagtgctgggattaaaggcgtgcgccaccacgcccggctcttgtgaattttcttagggtcacataagtatccacttttgggatcagagacactggtctgggaggcagaagagcagaggccagctcccgggtgtggaggtactgtgttctctgcctctggcctgtctctagaaagagagcccagtaccgtcccagtctgtgttcagtgttccagccttgtgagctttgtctcctgaaaatgccttaggctcctctaccttctttcttccaaggcagtcacttgtgtctctcccttcaggtcggtattcaattgttaactgtttgggcttagaggcggaagctaatctggacactgggttcttgaacttttgtgtaatgttggagccacctgggcctctgtttctcaccgagtgcctttagttttctgatttgtttgttttgttgagaccagagagtctcactgtgtttccctcactgttcagtgggtggggggtgagtgggtgcagggggagcatttctgtttcttgcctctcaccctaattactacctggtgagccctcccagagagtagggcctaggtcttgcctccacatttagagtatcatgtggtataccattaagacacacatgtagaacagatgagtgtttgttttcgacatgtttccataccaagtatgagatgtatcttaaggttaggaggaactctataaatctatttatatgtgagcgttgccactaagggacttgtctgggtctgtagtagaatgtatcactagacatagacaaaggcgtttctgtgccaggctctagtggacagcatactgtactagagcgagtgtgcagcatgctcacacaaacgtgttttctcaacagcccagcctttcctgccagggacatgctatggtggtagttcttcttggagcttgacccttaattgaactacagcagagaaataggacaatttgaaggtgttttctttttatacatatattttaccagtagccttggctggcctggagattgctctgtagatcaggctaacctcgaactcaaatagcccatctgtttttgcctcctgagtgctgggattaaaagcatgctccaccaccacctggcccaaggttacccttttctaacctcaggacttgaacttagaaccactgtgttaggcattggctggtggtcaagactgctagtagaacagatgagaaacctccccttcacacagccccctgaaacttgcagtgctgcatcttcaagagtatcactttcctcggtagcagggatcaaggtggtatggttagctttttggcccagggactgtgtggtgctccgtggagccctgggccatatgggctcctgccttagggattaactgtcataccctgaggcatttgtggccaccactcatccataatatcagtcagaaaggaaagggaaagataattccaggaggaaagaagagctcatgggactgtagaggtagatcctacaggattaatacactttgggcagaggaagagcctactaaactgtcgtcatgtatctgaccctgccccttcatgagtcaacccgatcccagacttctcttggcaactagcagatcaatagaactggccagttggccatggttgccacctgggtttatctgaacagtcggaattagtctgtcacctagcaggagctggggttgtagcccttatgaagtgggacggtcttcctcagccctgcagtgctaatcatgcagtgtgtgtttccctacttgtgacctcttagcaggagaggctggagaggaagaggagaaggagccactgcccagcctggatgtcttcttgagccagtacacaagtgaggacaatgcctccttccaggagatcatggaggtggccaaggaaaaaagccatgcacggcacgcgtggctctaccaggctgaggaggaatttgagaaggtagccctggagcttgaaaacaaaggcaccttcttttgggatggagtcccagggccacaggtacaggatctgggtgcctctctgaccctgctttccccccatgtcactatagcgacagaaagataatcttgaactcccatcggcagagcatcaagccattgagagcagtcaggctggagtggagacctggaagtacaaggccaagaactctctcatgtactatcccgagggtgagtgaacaaggcagaagacaaggcctatagtggtctgtcttgttacctttgagccaggttggggttggggcaatctgtgacgcttttgggacattgtggtcttccctactgctttgttgagggtttgtgagctaaggtggctctactctgccttgccaggggtgacttagctcaggaggtttatctagccttgaggctgcatgacttgtaaggctgaggtgaggcatggggctcaccccccacttggagccctgctaccttgttcttttgataggtgtccctgatgaagagcagttgtttaagaagccgagacagatagtacataagaacacacgtttcctccgagatcccttcagtcaggctttgagcaggtcccagcttcagcaggcggctgccctcaatgcccaggtgagtaagcagagtcaccaggcagctgaccagctgcgttgggaaaactggagaggtgtggcttctcccatcttggttgtccctttaagttagggtttttctgaggctagatggagcttaattgtcagaactgctacagcccctgtgtggcaggacctgtatcttgttttggccccttccaatggggctagatatatgacctatggttctagcccataccagctcctatgatgttggccagagaggagagaagtttctagaggccatacctatatacatataccatacatatacataccatacatatatatacctgtgtagcagtcagcgagctgagaagagcgctgtatactgggaagttccagaaagagccaggccactgagatccttcgatcaggatgagtacgtgccctcagagtgtccctgatcatcatggggttggaggcgaggcaggagatgggaacactcagatgccacaggggagagccagcactggccctctgtagcattgcaacccaagaggctcttccttgagggaagggaggggcaacctttacttaatgttcactgcttcagttcctcacgtccttggggagaggtgagaatgggggtcttccctctctcctagagccccagctctttcccagagaggggaagtgcttccgatgtgtacgttagcacctaccatagtcagccgtagagaacctctgacactggtctctctccttctcccagcacaaacagggcaaggtcggccctgacggcaaggaactcattccccaggagtcccccagagtgggcggctttggatttgttgccactccttctcctgctcctggtaaggaatacgttatacgcccaggctggccaggctgtgcacagcctctcccactgggtactggctggttgtgtgtcaacttgacacaagctggagttattatagagaaaggagcttcaggtgaggaaatgcctccatgagatccagctgtaaggcattttctcaattagtgatcaagtgggggagggcccctcgtgaatggtatcatctctgggctggtagtcttgggttctataagaaagcaagctgagcaagccaaaggaagcaagccagtaagtaacatccctccaaggcctctgcatcagctcctgcttcctgacctgcttgagttccagccctgacttccttaagtgatgacagcaatatggaaatgtaagctgaataaaccttttcctccccaacttgcttctttgtgtgtgtgtgtgtgtgtgtctgtgtgtgtgtgtgtgtatttgtgagacagggtttctctgtgtagtcttggctgtcctggaactcactctgtagaccaggctagcctcaaactcagaaatcctcctgcctctgcctcccaagtgctgggattaaagcccaacttgcttcttagtcatgatgtttgtgcaggaatagaaaccgtgactaagacacacgtgtgacctgaaatgcctcaggttttgcttgtgatatgaatgggcatactgatgcacgtatgcacagttcttatatagatttagagagttgtgcaggtggagaggccctggacactagtcccacagtctctgcaagggaatcaagtgaaacccagctgtccttggtgccccaccacacatggcctccacactaggtgctggttgctgtaatataacaccacaaggtgtcacataggaaggcaccatatggttgcactggcatttaggaaaccttggaaagcaagagtgttttcttccattggcacccctggccctgtgctaggatggggtccaatagacccgccttccctgacctaagtacagccatcttgctttggggtgctgctgtttttgaattttcccttcaatttgtgagggaaggaaaggagtttgtctgttggcctcaatggcagctaggcttcatgtattggagagaaagataactcccgcactaggtactccggcctgaggtgtgtgctctccctctgcaggtgtgaatgagtccccactgatgacatggggagaggttgagaacacgcccctgcgagtagaaggatccgagagcccctatgtggacaggacacctggacccacattcaaggtgagttgtgctgagcgggcatcagtctgggactcagtcaggataccttagtaccagctgctcaggactcagcacagacactggacttctgcagaagagggcattacggtaggactgtcaaacagatttggaagagtggaggccatggcaaggcaacaaggcaggtctggaggctacactgtcacagagtcagaccaggaactccagctgccctgtagacagaagggctacgtgctagcctctggttacatagcatagttaaggatacacaaggtagtacagtatgaacccagtattgtaggtgtgggtagaatggaggtcaagacctagagcagaccagaaagtccaagtcagatagggcgtggtgtacatcatgtggcccctgtcaggtggcccctgatggcatggatgggtgggtgagcagatagacgccctgagagctatggggaggaaacacacagtgtccaaggctatcgggaatctgtggatgagacagtgtctggtgtagtttggaaagtgaacaaagaaaggtccctgagacttgagagtgtacatactatgagggtgctgggcctcagtgactcatggtatgcatgggcaggccaagaatgtgaatcttctgaggaaacccaacaggatcagatttagtgtaggataaatgtatagatatgctttagtggctgggtcacagatcattttaagccaggccttccaaactgcctgtgatcagtttggaatgtggtaggaagggatcactttagtgcaacagtggtgtcagagtcaccaggggtagcatagctctcagaaagcgaatgctggcttgttctgtggttctgacactgctttccctgacatggccctgggggtccttcccgagagcagatgtagaggttatgtactacacacctagacacatcatgggtagagattgtggaggtcttggttatagactgtgtctgggatgtaagataaccaatacaaacatgagagaggagcagacaggatgctatgtggcccagggctctgactggttgcacagaaagcaacactagacccgcagtggcctttaccaaggcagagaattctgctctgccggagacagggcagatgtagcctactgtatactttgttgtccaagtgtcaagcagatggaaagctggggacagacaagaaagagtggaaggtatgggaaagatggtgtttcggatggtgcaggattgccaggcctttgcggataaagtaaactaggtcccaagtgtggtaatagcaaagtaagttccaggaaagtgaagacccttactgtaaacagttagaaattaacgtggtttaaactattattgtttgtttgactaattttgttcttgtgttgtgctgggggttttacccaggacctggttccatctcttttagtgtctgaagtgctgggactagctcttgtttatttttgtttcttgagacagggtttcactatgtagctcagatttgccagaaactcactgtgtggatcaaagctgcccccagatcagagatctgcctcccaagtgttgagactgaaagcatgcaccaccactcccagctctcagccccttgttttgccttgttttacatttattcgtgtgagtatgtgtataagcattatgcatggcacatgccacagcacatgtgtggaggtcagagtgtaagaacctgtaagagtcgttctttctcttttcacctacgtggtcttaggggattccaaccaggttgtcagtcttttaacaaacacctttgtccactgagccttttgggggttttgtttgttttttaacacagggtcttactatgtagctcagggtatcctcaaattctacagtctccttccagttgctgggattgcgtaatacaccact

SEQ ID NO: 270 - DNA, 1149 bp, Mus musculus
atgtatatattccgcctcttgcgccgcccgcccgcgggcatggcgactgcaggcagcgcggccagccgcagggaccccgggcgaccctgccctttctccatcgagcacatcctctccagcctgccggagcgcaggcccgcgacgcggccaccgcagcccgtcggtggtcggaaccccgccgagctagacgaacccgaggcgcccgtccccgctgctccttgcgcctgctgctgctgctgcaacccgcgcgctgcgacccgcggaaccccggagacatcgtccgggccgggcttgcggctggcgtggccgctgaggttggcgcccgccacgccctctcccttgacggcgcctagagcaggctccccggcgctgactggcacgagcggccccggcccgcagaggcgcacgcggcgccaccgtaccatcttcagcgaggagcagctgcaggcgctcgaggcactcttcgtacagaaccagtatcccgacgtaggcacacgcgaacgcttggcggtccgcatccgcctgcgagaggagcgcgtggaggtctggttcaagaaccgccgggcaaagtggcgacaccaaaagcgtgcttcctcatcgaggctcctgcctgggactaagaaaactcccaaggagagttgttgatgctgtccggagtttatctggctttatgaagtagagcacaaggaaggaggagggggacagacctacctgaacaggaactaacgctgccagcactggcagccaggggatccaaagccgccttctcacccatgaagggagggcatgtggggcaggaaccagagacctcctgcaggtcaagtgcagacacagagcaggtcaacttcctcagccaccctcagcacctagagaagccctagctccatgcaggacgaagagcctaactccccacctcatgcctgtcaccaagactggcctcttctctgtccttccaccttcttatgcaaggcagtggtgtctgctcagccctgggcgtactctgtcctcacaggccctgcactttagggccctggtgtcatgacctgtggaagaagaaggttgtagttggtagtttccagattcctgcatctgctccttcacctcagccttgagctgatgccaagaaataaacgagatcttcaaagacca

SEQ ID NO: 271 - protein, 212 aa, Mus musculus
MYIFRLLRRPPAGMATAGSAASRRDPGRPCPFSIEHILSSLPERRPAWPQPVGGRNPAELDEPEAPVPAAPCACCCCCNPRAATRGTPETSSGPGLRLAWPLRLAPATPSPLTAPRAGSPALTGTSGPGPQRRTRRHRTIFSEEQLQALEALFVQNQYPDVGTRERLAVRIRLREERVEVWFKNRRAKWRHQKRASSSRLLPGTKKTPKESC

SEQ ID NO: 272 - DNA, 21293 bp, Homo sapiens
tttaactgttagaggaaaaaaaaaccacctgtgacagaatatagtttcttctttaagtataggggtgcatgacttaatccttgcctagcatggcctttggtcctgtttataatttggtatcgttttgccagagtctcttctgtcagtcttatgatctctattttaacattaatgttggtcagttgtgcctaaaccacaaaagggacagggtacagcgaggcatgtctgaccttctgtcctgtcatggctgttaactcagtttttaaggtttctctggggtcctttggtcaagggggatcttttcagttggtgggagtgcttaggattttactttcagttctcaaaagtgagacctgttttgcaataaaggctacatgaaagttcctgaactgcccctaccaagataaaaaaaacagtgctggccgggcgcggtggctcatgcctgtaatcctagcactttgggaggctgaggcgggcagatcacgaggtcaggagatcgagaccatcctggctaacatggtgaaacctcgtctctattaaaaatacaaaaaaatcagctgggtgtggtggcgggcgcctgtagtcccagctactcaggaggctgaggcaggagaatggcgtgaacccaggaggcggagcttgcagtgagccgagattgcgccactgcactccagcctgggcgacagagcaagactccgtctcaaaagaaaaaaatacagtgctgcgtcccaggaaggatagcagagcttagaggtctcagttgaaaattgaaaggatggccgggagtggctggtcatgccttgtaatcccagcactttgggaggctgaggcagggggctcgcttgagcctagtagtttgagaccagcctaggcaacatagtgagaccctgtctctataaaaaaacacaaaatttagcccggcacgatggtgcatgcctgcagtgccagctacccaggaggctgaggcaagagaatcaccagggcccaggatggtgaggttgcagtgagtgttgatcacaccactgcactccagcctgagtgacagatcaagaccctgtctcaaaaaataaataaataaagattgaaaggaggttgcaatgtggtctttagcaaatcccagtttaatacattatctggctcctgcaaaaaccagtggatcatgttgtttaatcccaaaactagaaggacacgctgggcgcggtggctcacgcctataatcctagcactttgggaagccgaggcgggaagatcatgaggtcaggagttcaagaccagcctgactaacatggtgaaaacccatctctactgaaaatacaaaaattagccgggcttgatggcacgcacctgcaatcccagctactcgggatgctgaggcaggagaactgcttgaacccgggaggcggagattgcaaggttgcagtgagaggagattgcgtcactacactccagcctgggcgacagagtgagactttgtctcaaaaaaaaaaagaaggacacttccacaacttgataaagggcacctatgaaaaatcctcagctaccatcacactcaatggtgaagaccgaatcattttcctctaagatcaggaacaacacaaggatgtacactctcgccacttcaattcaacattgtattgaaagctctaagctgggcacagtggctcacgcctatgatcctagcattttgggagaacgaggcaggtggatcacctgagatcacgagttcaagacaagcttggccaacatagcgaaaccccgtctctactaaaaatatacaaaaattagccaggcgtggtggtgcgtgcctgtaatcccagctacccaggaggctgaggcaggagaatcacttgaacctaggaggcagaggttgcagtaggccaagatcatgccactgcactccagctgggcaacagagtgagactctgtctcaaaaaaaaaagaaaaagaaaaagaaaaaagaaaagaaagctctacaattaggtaggaaaaagaaataaaatgcatcagtattggccgggcacggtggctcacgcctgtaagcccagcactttgggaggccaaggagggcggatcacgaggtcaggagatcaagaccatcttggccaatatggtgaaaccccatctctactaaaatacaaaaaaaaaaaaaaaaattagctgggtgtggtggtgcacgcctacagtgccagctattcgggaggctgaggcaggggaatcaaacccaggaggcggagattgcagtgggccaagatcacaccactgcactccagcctggtaacagagtgagactctgtcaaaaaaaaaaaaaaaaaaaaaaaagaacaaaatattagggaacaaatgtaaacaaaatgaaaacttaaactctgaaaactacaaaacattgttgaaagagatcaaagcactaaataaatggaagacatctaatgttcatggcttggaagagttaaatattgttgagatggcattgctccgaaaactaatctacagattcaatataactcctattaaaatgccagctgaagccaggcatgctggtgagcgtctggacttccagctattcgggagcctgtggctggaggatcacttgagcccaggagattgagaccagtctgggcaatatagtgagaccttgtctctaaaaataaaaaggcaaaaaacgggcaggcgcaatggctcacacctgtaatctcagcactgtgggtggctgaagtggaaggactgcttgaccccaggagttcgagaccagcctgggcaacatagccagaccttgtctcaattttttttttgactccctagtagctgggacacaggcctacgccaccacgcccagctaatttttgtatttttagtagaaacggggtttcaccatgttggcttggctgctctcgaactcctgacctcaggtgatccgcccatctcagcttcacaaagtgctgggattacaggcatgagccactgtgccaggccagcaagaccttgtctctacaaatatatatatgtgtgtgtgtgtgtgtgtgtgtatacgtatatatatattttttacaattagccaggcatggtggcatttggctgtattcccagctactcaagaggctgagatggaaagatggcttgagccaaggaggtcaaggctgcagtgagctatgatcatgccactgcactccagcctgggcgacagagtgagaccttgtttcaaaaaaaaaaaggtaaaggctgggtgcagtggctcactcctataatcccagcactttgggaggccgaggtgggcggatcacctaaggtcagaccagcctggccaacatggcaaaacctcatccctactaaaaacacaaaagttagccgggcatggtggcgggcacctgtagtcccagcaactggggaggctgaggcaggagtatggcgtgaacctgggaggcggagcttgcagtgagccgagatcgcgccactgcactccagcctgggcgacagagcgagactctgtctctggaaaaaaaaaaaagaaagaaaagaaaaagtaaaaactgcccacagaatgagagaaaatatttgcaaatcatatatctgataagggactagtatcttaaatatacaaagaactctcacaaaccggtaatgaagaagagacaaaaaaaaaagcagcctctgggagcccagcggcctgggatgccagagcaactcctccaaggcgaagggcgagcgcccagctcctctcaccactatgaaagaacacaacagggtgaggcttctttgcgatttggaggcggaaaaaacttgggaatactgcccaagaaatttgtgggtgatatggaggatgccagcttttagtagagcctagggcagtatgggatttgctgcaggtccaggctgtggtaccagcagccctgagcctgaccctgtgacctgacagagccatggccaacgcttggcagagaaaggtttcatgtggcgccttcagcaggctgcagtggaagggtggcagtgcccactcctagggttctggagcaaggccatgccacataccattcacaaaatagccgggcgtggtggcaggtgtctgtagtcccagctactcgggaagctgaggcaggagaatcacttgaacctgggacgcggaggttgcagtgagctgagattgcgccactgcactccagcctgggagacagagcgagactccatctcaaaaaacaaaacaaaacaaaacagctccttccacgtttctgggccctggcaggaactgggcatctgacgatgggctactgagtgaccagaaggctcattagagctgggtattgtcagagacacccactgggtcttttatttattttattttattattttattttattttgagacacagtctcgctctgttacctaggctggagtgcactggtgtgatcttggctcactgcaacttagcctcctgggttaaagcgattctccagcctcagcctcccgagtagctcggattatagatgcctgccaccacgcccagctaatttttgtatttttagtagagacggggtttcaccatgttggccaggctggtctggtactcctgacctcaggtaatccacccaccttgtcctcccagagtgctgggattacaggcatgagccaccatgccaggctttatttattttattttttgagacagggtcttgttctgttactcaggctgaagtgcagtggtttgatctcggctcactgcagcctcgaactcgttcaggcgatctttcaggcgatcctctcgctttagccttctgagtagctgggaccccaagcacatgccaccacgcccagctaatttttttatttattgtagagacaaggtcttgctatgttgcccaggctggtctccaactcctgagctcaagcaatcctcctgcctcggcctcccaaagtgctgggattacaggcgtgagccactgtgcttggccaagccaccaggtctcaaggtaccaaccatccacacaacagaagtggcattacgaggatcagctctcagcaagtccagaggacacacgtaagctgtgaaagcaggtgactgccatcccatgtggcctcacttatgacatctgccccacagctcactcaggcagccctgaacggcagtggagcatgagggcaaagactcccaaacggcagagtttctgtgagcactgtgccatccactctgcaaaggcagaacctgcaagacccaccagctgtagcaaatagttgagctggttggttcagggacctggacagagcaagattagaagttaagagatgagggcctggtgcagtagctcactcctgtaatcccagcactttgggaggctgagatgggcagatcacctgaggtcaggagttcgagaccaggctgggcaacatggtgaaaccccatctctattaaaaatacaaaaaattagccgggtatgtcagtgcatgcctggaatccagctactcaggtggctgaggcacaagaattgcttgaacctggaaggcagaggcaggctgcagtgagccaagatcacactgctgcactccagcctgggtgacagagtgagactctgtcttggaaaataaaaaaaaaaagaaaagaaaagaaaagaaaagaagaaggagaagaagaaggaggaggagggggaggggaaggggagggggagggtgagggggaggtgagggggaggggagggggaggggaagggggaggggagggggaggaagaggaaggatgttaggagatgaggacatcaagagaagtacctgaagctccagggtgatgagtcaaggtggctcacgcctgtaatcccagcactttgggaggctgaggcgggcggatcacctgaggtcacgagttcaagaccagcctggccaacagggagaaactccgtctctactaaaaatacaaaaaaattagttgggcatggtggcacacacctgtaatcccagctactcgggaggctgaggcacgaaaattgcttgaacccaggaggcggaggttgcagtgagcagagattacaccactgcactccagcctgggcaacagagcaagactccatcttaaagaaaaaacttttctttatagagatgagggtcttgctatgttgcccaggctggtcttgaactcctggcctcaagtgattctcccacctcagcttcccaaagcattgggataacaggagtaagcctccatgcccggccctaaatcttgctttttgaatcatatcttctttctttttattattggtagctagaagaagccaagtagcaccttgaactttctctctgggtatgtccttagatcattttattcttgggaatactatctagcttctatttcctatttggctacaggtgacaatgttgctaaacttcctgccactgcataacaatggtcttctttcctccatcttccagtaacaatttcttcactttcctctaagtccccactgtcagcctctgcaaggtcctcccagctcctggacactgccccatcccaaagccaatgtcacatgatttaggttttgtatcagcagcacccaccccacttccagtaccagatcccgttctgcttatctatagttatataacaaaccacatcaaacttggtgcagtaaaaacacccagcatcatctattttattatatttcatagtcatggggcttgactgggctcagggaggggattctcagttttggtgtctcctgtggttgcagtccaatggtggccggggccagagccatctggaaggcttcctcactcacttgtaggtgacccgtgcagggggtggatgggtccttcagctggtgctgctggcaggaacacgcctatcctctcccgaggctgcctgtgcccctcacagcatggtggctgggtgtaaagatcaagcatcccaagatgtgtgagagagagagaaggagttgggttgctgatctgatctgtgtgactctgtgtgtgacttggcctcagaaaccacacgatgtcagttctgctgcattctatggattacaagcaagtcgtgaaggccagcccatgtttcaggaagaaacccaattaaactcccaaagggagcagcatcagagaacctgccagcatgtttcagaggcgccagagtggccaggcacggtggctcacacctgtaacctcagagctttgggaggctgaggcaggtggattgcttgaggtcagaagttctagaccagcctgggcaacatagtgagaccctatctataattttttttaaattagccaggcatggtggcgtgtgcctgtgctcccaactacttgggaggccgaggtgggagaacctcttaagcccaggtgttcagaggctgcagtgagctatggtcacccactgcactccagcctgggtgaaagagcgagaccctgtctcaaaagtaaaaaaacaaacaaaaaaggccgggcgtgtaatcccagcactttgggaggccgaggcgggcagatcacaaggtcaggagatcgagaccatcctggctaacatggtgaaaccccgtctctaataaaaatacaaaaaaaaaaaatagctgggcatggtggcaggcgcctgtagtcccagctactcgggaggctgaggcaggagaatggcgtgaacccgggaggtggagcttgcagtgagctgagatcatgccactgcactccagcctggacgacagagcgagactccgtctcaaaaaaaaaaaaaaaaaaaaaaaagggaggggggcaggccaggcaggcacggtggctcatgcctgtaatcccaacactttgggaggctaaggcaggcggattgcttgagctcggcagtttgagaccagcctaggcaacgtggcaaaacccccccaaaacagaaacattagctgagcatggtggtgcacctgtagtcccagctacttgggaggctgaggcaggaggatcacttgagctcaggatgccaaggctgcagtgagccatgatcacaccactgcactccagcctgggtgacagagcaagaccctgtctcaaaaaataatgcaaaatagaaaataaactttttgaaaaagtgccacagtgggccatttaccaaggtggactggtaaagaggcagggcacacgcagaggcaaataggtagaagagaatgagcactagagatggacaggtgggcagtggcccatttgtaaaagtggagaacatagggtaagaaagggattttgagaagaccttgagttcctttctggcatggtgactgggagaactttattggtagtggagatggagatgtggagcaggctccagaaacaagagcgtggagcagagagagaggccaggctggaggtgcacttgtgagtcactgtcacaaagatggtgtctggagctccaaggctggaataggtattgagggtgagaatgggaaaggatgaaggaatggccagggctaggaggaagagggctcagcaaatgttgggctggctctcctgaccaatgaccctgcctcccccatcatagcagcactctgattttggaggatggtccagatgcagttctgtgagggaggtctgctgagggaggagggatccatggccatccaaagggccatgggaggagatgaaaagtgtggggctgtggcagccattctaccaccaagaggtgggtggaggaggggttgacagagccactcatggaggtggcagctcatcactgagcctccagactacccctgggaaacctatgtgggagctcttgtgacagaaattaaatcagcaggttcggtcacagtgatgtccacagcactttcactgatagcagagtggggatggcagagtcttgcagaggggctggcggcgggaggagcgcaggaatacgcattgccctggggaggcggccaggttctaaccgtctcacacctagtcactacactttacagattgggaaagccaagcccagaggctgaagacgcctatggaggtcacacggccagaaattgacaacggagtatgagccaggccgtctgtttctctgtgctatgagtcccatactgtattttcaaaggtcaagaggaaagggtcttaagctgaagtgacggtcccgctgccaggagccgcttcactgagggtgaaacaatgtagccaagtgcgggtcacctgcgctgtggcagaagggaccgaggacggtgtggccagaggactggcctgggcggagagcgaggagggggagcccacagcttctggggggcagtgacagtgcggggaagggcgaggtgcagtgttggatgttttcgcggggattctgggaccagtgggaaagctggaggacaggcggctctgaagcaccgaggaggggcctcggaaggggcggggaggtctccttgacacaggtgaggagacggagaactgggggcacccggcagcccaggcttcctgccgcgctctcacgccctccagggccatgagaccctggctccgaggtggcgggcaggttcgggacccgagcgcggcgggatcgtgcggttgccggtggtgctgggccccatggaggctgcggtccaggagtttcgggtgggcggctaggccgagcttctgcaggcgtgctgagccgccgcagtagggccccagaggggacgaggaattaggcccagccgaacgagggggagccaccagaggctgggccgggaggcaccgccgcgctctggggagctgccagggtcggggcgccctccgagcggctgccaggccccgcgggcggcggcgagccggccctccgccccttccccgcaggtaagccctgccagcttgagcggcgggcgcgggtggggcaggaggacgcggggcggggtggggggcacagggggccctctctgcagcgcccccggcccccgcgcgcggaggcagggccgccgcagtcgaggattagcgcgttcgcggccggcgctgcgggattaacccgcgtggactggacgcccggcccggggattactgcgcgctccctccccgacgtatatattcccgcggcggcggcgccccggccgggccgggcatgtcggcaccggctgggggcgcggcgagccgccggggtgccgggcggccctgccccttctccatcgagcacatcctctccagcctgcccgagcggagcctcccggcccgggccgcctgcccaccgcagcccgccggtcgccagagccccgcgaagccagaggagcccggggcgcccgaggctgcgccctgcgcctgctgctgctgctgcggcccccgcgcggcgccctgcgggcccccagaggcggccgccgggctgggtgagtgggcgcggagcggggcgcggggcccggcggagcccggggcgcggcgcagtgggtgccgagcttggccccagccccgcgcctcaccgcgccctcgctccgcaggcgctcgtctggcgtggccgctgaggctgggaccggcggtgcccttgtctctgggtgcgccagccggaggttccggggcgctcccgggcgcggtcggcccgggttcgcagcggcgcacgaggcgccaccgcaccatcttcagcgaagagcagctgcaggcgctcgaggcgcttttcgtgcagaaccagtatcctgacgtgagtacgcgcgagcgcctggccggccgcatccgccttcgcgaggagcgcgtggaggtgagtgccccgcccagcctttccccggagcgcgcgggccgcggctacactggactggggtcctggcgggcgggcgccctttgcaaagacggcctcggcccaagccccgccctggcgcgccggagggaggaggtccctggacggcgctgggcgtccgggggtatgaggagcgggtgagagcagggaggtgccgcgggaaaggaaccggagggctacttttcttttcttttgttttacactttcctctggtgacgaaagaggcccgcgttcacgtccagaatttgggaaattcagaagagcccgcaacccaagaaggggcgtcctggtcgccgccagctggaggctggggcgggtactaagggggttcccatctcgcgtccagacccaccgagtctgtccgcagcgaataagggcaggtggcgcgcagccgcggcccgggtgtcggctctacagcgccgtccgcccacatccctgttgcgaagctcccctctcggtccctgtgggaccctcgggagccggtgggacgcaggacctggggctagggctgagcattccccccatccccaggtctggttcaagaaccgccgggccaaatggcgacaccagaagcgcgcgtcggcttccgcgaggctcctgcccggcgtcaagaagtccccgaaggggagctgctgatgactctaggagctgcccctgggctcggccaccctttttgggatctttggagttggcgctgagagaagacaggtctacccgaaaaggagctgggagagtacaccggccgcctccacccgtctccacagcccttgcctcctgcagctcgtgctgccgtggcgctggggacgggcccccggtgcttggtgttccacggcagtgggagtggcgagtcccttgggggtgggctggggcatagagcagtttcctcagctccctaccccccgagagacactaactccaccgcaggaggggaaccaccccgtatcaacacgggacccagaatcctacgcagtggagcgtctctccgcaccctgggacatgctggccaccctcttctcaatgtggacattgacctaacttgacctggctcgtcctcccccagcgggagaggggatggggttcgtgtctgtgcagtcctggcgttgcaggcttcccaggccctgggctgggtcttggtatctggacctgtagaataagaaggtcgcaggagcgattccaggagcccctccacagtcccttcaccttcgagcctcgcgctgatactgagaaactagcaacttcaaataccacagaagccgcccagagtctcaagtccaccttggctccactcccacacccaacaaggagctgtcccttcttcttccttcccagcgagggggtatttagggtacagctgtctttgagaggagcacagctcagcgatcctcagtctctgcaccagggtgctccccagcagaggggactgctccacggatggtggccttggacccctggggtccagccctggcctctaggctactgtgaacctgcccatgggtgagggtcccctgcttcctcctggggttttcatgctgtgggctcggactccctcacagcaatctgtgccatcctagggtagggcaagaggaggttggactggggagaccccgcccctgctgcctgggaagatgcctgccctccccttctttatcctggcccatggcaaaaggcacagtggaaagaagccttagattccccaagtaggccctacagtgggtccaaagcatctcacatccccacccccagctggcttgagcacctcgttctgtctccttacaggccctgcagggaatggggccattctacctgcaagagatgaagtccatctctaaaagcaggactgcagaagccagggctgcagctccccagacaccccaaggctggccagcttggataacaccaagcaagcatggtgtccccagtcagaactgccctgacactgctgggtgtccctagcatccccgcctccacccctagcatgcacacaaagcccttctccctgaaccctggtcttgcccttggggactgaacagactacctgtggacatgcccgtgtcccagtcagctcccttgcagctggggacactcgcatctcacaggctccaggccccttgagttccttggttgaatggccatctgtcattgttttgggagccccgatcagagcttgtggagcgccaccttccagggctcagtggctgtgttgctctcctgaatttgcttcttgagctctagctgctccttggcaggctgaccccccacagcaggctattaacataggcatccttcacgctcacacccaggcgctcgcttctcatcttcaccctcttcccggtttatcttttaccctcagactccaattcccatctttctgccacatttacatctcaagccaggcacttcccctgagccaggtatttatctccagctgtccccttgaagcccacagactccttaaggtcaccttgtccacagtgagctcttctgtgcaaaccaggcacatgagccagagagctagccgcccacccgaaactggtccctggacccctccctctcctgatcatccactatacccaggctgacaggaagtcagttttactgtttatcaataaatcaataaatcccagaatctctccagctctaactgcaccagtctgatgtaagccaccgtcacctctcaccttgaccactgcaactgtctctaatcttgtccacctgcaccacactggctctgcttttttgtttgtcggttggtttgagacaaggtctcgctccatcacccaagctggagtgtagtggtgcaatcatggctcactatagcctccagctcctgggctcaagcgatcctcccccatcagccttctgagtagctaggaccacaggtgggcaccaccacacccgactaacttgaaaagttttttgtagagatgaggtcttgccatgttggccaggctggtctcaaacttctgacctcaaactatccgccggcctaggccttccaaagtgctgggattataggcatgagccactgtgcctggcctgccccttcaattcagaatgaagacaaaccacctcaccataccctacaaggccctgtgcagcctggccctgcctctctggcatcatctcacacctcactgcactctgcatttccaaaggacttctttagaacttgccttgctccctcccaccactaggcctttgcacatgctctttccacctgactgttgccggtttgttcgtcttttgaatctgcaatcactttctgcctggggaagcttctctgacctcccgaactaggtcaagattccccaagtacaaactcttttcttgcacggacacagctgcaattttacacctgtttgtgtgatgatctaacaagtgtctctgtcttccccattgcactgtcacttctacaagggcagcagcagcacgctgcacttcagtgaatgaaggtatccctgtatgttgcaaaagcaaaattgtattaaattgttccagggcggaatttatttgtccaacacaattcacatctttcgtttgggaagaaattccttaaaaatgccgaggcaattttctggttcacttgaatattaatttttttttttcttgacagagtttcactctgtcacccaggctgtagtgcagtggcacaatctctgctcactgcagtttccacctcctgggtttgagtgattttcctgcctcagcctcccaagtagctgggactacaggcacctaccaccactttgtatttttttttttttttagtagagttggggtttcaccatgttggccaggctggtctcaatctcctgacttcaagtgatccacctgcctgggtctcccaaagtgctgaggttacaggcgtgagccaccgtgcctggtcttgaatgagaatgatccctcttctgggaagcccactctggcatttgggggcccaataatcttttttttttttttgacagagttttgctcttgttacccaggctggagtgcaatggtgcaatctcagctcactgcaacctccgcctcctgggttcaagcaattctccagcctcagccttccgagtagctgggattacaggcgtccaccaccatgcccagctaatttttttgtgtgtttttagtagagatggggtttcatcttgttggccaggctggtctagaactcctgacctcaggtgatccgcctgtcttggcctctcaaagttctgggattacagaataatctttagacatttcttaatcgaaccactgtcttgttctttcaccttttgttagataactataaaaaaaaaaaaaagattgttttggccgggtgcggtggctcacgcctgtaatccagagaccagcctgaccaacatagagaaaccctgtctctactaaaaatgcaaaattagccgggcgtggtggcccatgcctgtaatcccagctactcgggaggctgaggcaggagaatcccttgaacccgggaactccggtgagccgagatcatgccattgcactccagcctgggcaacaagaccgaaactccgtctcaaaaaaaaaattgttttaaggcccttttcttgcataaagcttgaaactcctatataagtaaatttcctggtttgtatttttgtagaataatctcgaagcatacatagttcttatttgtgggaaattagaattctaaggcctttggacgctgcaaagccagaatttctcgcgtgaagaacacgccctatagcatcctccccgccacctccacagcaccccctcgtgttcacagcattgacaagcatgaatagcgcggggcaggacaaggactacatttccaataaagtctagcatttatagtgacgtcagaacggagcgcgggctggctttctagagccacagcttttccattggccaactattggaggcgcctgcgcaaatggtgcagtcccgccccctccaccctgtgacgcgcctgctgggcccgagctttttcctgggatagcgatggagacgccgggcgcatcagcgtcgtccttgttgcttcccgccgcgtccaggcccccgaggaagcgcgaggcgggagaggctggggctgcgacgagcaagcagcgggtcctggacgaggaagagtatatcgaggtacgacctcggtgcggacgccggcgacttctgggcccatcctctgcttcaagctcctctcaggttccctctctcgggtgttgacactccgtctcctcgtggaagtggaggagccgggtgtggacggtcccacgagtcaagtaaacagggcagaggaagacgtctgtggtggaagaggctgtagtagtgttgtcagggaaaagagagagcggctctctttgtatgggacgggggtcagggaaagaagattttctgttaaagtgtgagtaggagtttgacaaactggaaggatggtggcaaagagggctttctaaagagcggtggcagcaagtgtgaatgctggggttcctggaaagagaccgcagttgtgacagcatctcgagtgagtggacctgcgtcgccccaccacacgcacacagaaggaggagctgaaacggggattggcggaagtcagtttggttttagacctgtttaattcgggacaccttttgggatatgtagatggatggctttaacggacggttgggtgcccagatatgcagctcgggagcaaggtctggctggaggtgcagacttgggaatctcaacttgtggtagtgactggctgaagttactcaggaaaaaggtttatttttattttattttttgagacggagtctcgctcgtcgtccaggctggagtgcagtggcgcgatctcggcttactgtaaccaacctctgcctcctgggttcaagccattctcctgcctcagcctgccgagtagctgtgactacaggtgcccgccaccacgcccggctaatttttgtatttttagtagtggtggggtttcaccatgttggccaggctggtctcgaactcctgacctcaggtgatccgcccgccttggcctctcaaagtgctgggattacaggcgtgagctaccatgccccgccaggagaaaggtttagattggaaatagaaagtcatgtgtggaatgaaagtgacaacacccacattggtctggcttgtggggagccagcaatggagaatgagaatgaccagttagcaagggcgagagagaagggtttcacggacttcagaagagtgtttagtaatgttagaggttgcagcatggctaccatatgggatgctcaaccccactagaaagtgccctcaagctccctcaatccagccccagtcattggggaagtagaatttgaaggaggttcagcaagttccttagcatgtacagcagtggacctgtgaggcaggagcacccagactgcagctccgactttcttttttctttttttttttttttttttgagacggtctcgctctgtcgcccaggctggagtgcaggggtgtgatcttggctcactgcaacctccgcctcccgagtttaagcgattcttctgcttcagcctcccacgtagctggaattacaggtgcctgccaccacgcccggctaatttttgtatttctagtagagactgggtttcaccatgttggccaggctggtcttgaacttctgacctcatgatccacctcccttggcctcccaaagtgttgggattacaggtgtgagccaccgcgcctggcctctgactttcattctgatctctccttgcagggcctccagacggtcatccaaagggatttctttcctgatgtggagaagctccaggcacagaaggagtacctggaagccgaggagaatggagacttggaacggatgcgccagattgccatcaagtttggctctgccttgggcaagatgtcccgggagcccccgccaccctgtatgaggaccctgtgggtggcggagaggggaaagcctgctgaactgtcgcttcaggctcactctaattcttatccccctctcttcccctagatgtgactccagccacatttgaaacccctgaggtgcatgcaggcactggagtggtgggcaacaagcccaggccccgcggccgaggcctggaggatggtgagtgagggtgccctctttaagtcacatggtcaggattgcctgggaatcttagcctgtgaggccctgagggggtggtccagagggctgcaggccacatcttgttcctgaggggtcttgcgtaaatagcagcctgtgaagtcaaaggacattggtctaggtggtagaacatctgggtccagctcccacacatggctcgcctctgtgaaatgggactctcaccagctcttgctggcttttctgctgtgttccagccctgccctgtgggcttcatggatgttggaaggccccttttgttactatcctgaagatgcctcagggcctctccatttgtttccttcatgttggtcacttcccagataactgcatggctcactgtgtttcttcctgtagatctctgcataggtgttacctgttcagagaaacttttcttgacctgccagtgtgaagtcacaacaccactggtgctctgtggcttccagcctggctttggtttttcatcacaagacattttattttattttatttcattttattttttattttttgacacagagtctcgctctgtcacccaggctggagtaaaatggtgtgatcccggctcactgcaacctccacctcccaggttcaagcaattctccctgccttagcctcccaaatagctgggattacaggcgcctgccaccactcctggctaatttttgtattttgtagtagagacgaggttttgccatgttgtcccggctagtcttgaactcctgacctcaggtgatctgtctgcctcggccccccaaagtgctggtattacaggtgtgagccaccgcgcctggccaagacataacgttttaaaggcatttctgtttatggtctctttccctaattggcatcccttgcacaagagcagaagctttgttttgctttcatctgtatgctccgtgttgggaacagcacatgtggtgttgtgggccttgcacagatacacatggaacagatgaaagagttgtcatcttcagcatgtttgctgggacacacagctctatatggtaacatcgtgacttgatgggggagtcggtttaggaaagggcactccgagtcctgttgaatgcaagtgttctgcacgccatgggacttctgcgttgtcaggccctcttttcatcagtagtagaatgtcagtgcatgtatagacaaacgagacactctttcttatcagtttgtagactccactgtgctggagtagcacagatgtgttgtgtgtttgcacaaacatgcaaacatgatactttttgctttacaatccagctttttcggccattaacacagtccttgttgtccttgaagcttgattatctgttgaaatgtagcttgtgcatcacagggcaatttgtagatttttttcttctccttttttttttttttcctatagagatgaggtttcattatgttgcccaggctggttttaaacttctgagctcaagtgatcctcccaccttggcctcccgaagtgctaggattacaagtgtgagccatcatgcctagccagtttgcagattttcaatacctgtacacctacatgccagtaaatataggaatccttttcagaacctaagtggtaggaaccatcatcatgtttacaggtgaggaaactgaggctcagaaaggcagtcacttctgcaggtctcagagatggtcagggtttcacttcttatctctctgagatgaatagagtttctgacccctgtcctcatcccgtgggtcttgagcttgtagccactgtgccttgtgcatagcctcacgtgtagcaggtggtcaggactgtcactagacttgaaggcagagctctccaggtggccccaccgaagtttgcaccaccacacgcagcaccagggcaccacctcagtgggagtaccactttccatggtggcagggttggtcggaggggggggtgtttggggttgtggcttagcacctgtgaggccccatccagaggactaagtcatatgagatccctggaattggggctcgctctcaggtcaggatgattaggcgatgaccacccacctgtagtacaggtaccaggaagagaagagtgggtaaggtaaggaaatcctagggagtgagggagagccccagggatttggaggcctggcacccacaggcctggcaccactttggtgggggaggagcctgcctgtgatcacgagctcttgctctaacacctgtattgctttctccagtctgaatcagaccacgtaattcccttggcatccagcacatgagcagagctggccctgaatctgtagggtaccacctgagggctctctgggcagtcagggtgggtggattctgcccccgtggggagtccttggcagtgtgggctttcatgggcagaagccaggaccaggggagaggattccagccctgcatgttgggggctatgattcctgggcctgggtgtcctcctctttcctgactgcaaagggtgctgtgttcctcctcccgcaacccctaagcaggagaggctggagaggaggaggagaaggagccgctgcccagcctagatgtcttcctgagccgctacacgagtgaggacaatgcctccttccaggagatcatggaggtggccaaggagagaagccgggcacgccacgcttggctctaccaggctgaggaagagtttgagaaggtgtctctggggtctggggtgtcacataggcgtaggcaccctctgtggtggttggggagccccagggccatgggtacaatgcccaggggcatctctgaccatcacttttccccatgtgattgcagaggcagaaagataatctcgaactcccgtcagcagagcaccaggccatcgagagcagccaggccagtgtggagacctggaagtacaaggccaagaattccctcatgtactatccagagggtaagtggcgggcctcgcagccaaatggggaggtgttgggtagagctgtgtgtgtctggctgtgtttggagcagccttccaggtgtgtatggccgtgcccccttgcagtttgggcttctgatgggtactggtctgtctaagggtggacaggtctgtgtgaggtcagcagtgagtgagaccctctccagcggcactggggcctgcgttctgctcaatgcttttgttcatctgggagtgacttggccgagaagcgagctcctcatgctccttaggctgctgcccttctgacacctgctgctacctttgcttcgtctgccaggtgtccctgacgaggagcagctgtttaagaagccccggcaggtggtacataagaacacgcgcttccttagggaccccttcagccaagccctgagcaggtgccagctccagcaggcagccgccctcaatgcccaggtgagcaggcgggtcagcagggccgcatgggccaggttggacagggctgcctgggggcaggcatgatctctcccatctctttgagcttggcagagctcagtgagtggaaccatctggggccctgtgcggcaggatcctgagtctttccttggccccagtgggcttcc

SEQ ID NO: 273 - DNA, 618 bp, Homo sapiens
atgtcggcaccggctgggggcgcggcgagccgccggggtgccgggcggccctgccccttctccatcgagcacatcctctccagcctgcccgagcggagcctcccggcccgggccgcctgcccaccgcagcccgccggtcgccagagccccgcgaagccagaggagcccggggcgcccgaggctgcgccctgcgcctgctgctgctgctgcggcccccgcgcggcgccctgcgggcccccagaggcggccgccgggctgggcgctcgtctggcgtggccgctgaggctgggaccggcggtgcccttgtctctgggtgcgccagccggaggttccggggcgctcccgggcgcggtcggcccgggttcgcagcggcgcacgaggcgccaccgcaccatcttcagcgaagagcagctgcaggcgctcgaggcgcttttcgtgcagaaccagtatcctgacgtgagtacgcgcgagcgcctggccggccgcatccgccttcgcgaggagcgcgtggaggtctggttcaagaaccgccgggccaaatggcgacaccagaagcgcgcgtcggcttccgcgaggctcctgcccggcgtcaagaagtccccgaaggggagctgctga

SEQ ID NO: 274 - protein, 205 aa, Homo sapiens
MSAPAGGAASRRGAGRPCPFSIEHILSSLPERSLPARAACPPQPAGRQSPAKPEEPGAPEAAPCACCCCCGPRAAPCGPPEAAAGLGARLAWPLRLGPAVPLSLGAPAGGSGALPGAVGPGSQRRTRRHRTIFSEEQLQALEALFVQNQYPDVSTRERLAGRIRLREERVEVWFKNRRAKWRHQKRASASARLLPGVKKSPKGSC

SEQ ID NO: 275 - DNA, 95484 bp, Mus musculus
  misc_feature (1)...(95484): n = A,T,C or G
agatttaccgatgttttctcagcgccaggcactctaggaagcattttcaattcattactttttctgtctctccatggctctgtgaggcaagtcctgttttcccctcacttttacagctgaggaacctgaaactgaagctcagttttgtatcaggccaacaagattcaaagaaaaaaaggtcgaggtttgagccagccctgctccctagaggacttggcagagctcctgaatcaggctcccatcagcctcctcagactcactcacacagtacaggaagttccctcagatcaggtgggccagtaccctgtacctacaactgtcatctttgattccttctcttcatcccttggctctttgtcctggccctacttgtcccatgtggccccctagacagtggctggcagctcctgactcctgactctcttttggttcctttcatccttctgtagcatcagtttaaaggaaaaaaaaaaagttccaggtaaggcctctgattggctctgtcagatcacatgttcactgtgcaccaggatgggtattggggcaagactgtaagcacaattaaaaccttcagaaatcaccagaagactggaggtggggagggagggctgctgggtgttgactttggccctgtttggatggaacaaggatggcgcctgtgggcgctgacgggtttcttttggttctgagtgatacacgggccctagctgaagtgggcgcagggaggagcagacctaaggcctcagttctgaggtgttgaggaggttgagcctggagaggaaggtggagatggtgttggggatggtgtatagtactgacttgaggcccagcaggaggccgggtgagggggctgtggctgggaagcgtttggcgttgacacgcccagtttgggagtggcgagaatgaggtgctgccacgggctgaactgggaggtaatgcattggagagctgggtactccatgagggacagggtgcgcgctgggaggcagagagctggtgatggaactgtgggtgcaaagagctggggttgtttattccgcgggacttggtttcacagatcagaggaggaagagcagctgcagcttctctggaggagagacggaggccacatgccaccagtggtcattgtgaagtgaaggcctttccccagtgccaatccctcccggtaacactttgcctttcctaacaagcagagggtctaggaagcaggaggatcggcagacagcacagtgctcacccatccctctgcagtcgctgccacttctaatcctctcagatgcttcctccagacatcttattttatattccttcagtccctacttctgcacataacacttttatgatccctctctgtagacattttaactaatttcctttttagtagatattttgaaaaatctttacatctgagcctgtgtctgtgtgcatgtgtgcacttataaataccatggcacatgtgtagaggtcaggacatcttgcaggagtcaggtcgtcaggcttggcagcaagcacctttatctaccgagtcatcctgcccacctctgagtctctttaaacccatagataggccttttccactccccagccttcctttctttctttctttctttctttctttcttttttttttttttttgtctttgtttcttttttctttttttgttttcccccagcctttctaaacagtttttggccccgctcactctggccctgctcagtctgacctaaagatttatttattattatatctaagtacactgtcttcagacactctagaagagggcatcagatctcattatggatggttgtgagccaccatgtggttgctggaatttgaactcaggactcttaaccactgagccatctctccaaccctatcctaggttttctgaatctatcattgtaactacagggtccttggaaatgagagatgatggtaggagcagggtggcagagaaggggtgagggtgagagagactgatggccatcgctagctttggagatggaaggtgctgtgaaccaaggaaaggcgtcaaactctagaaggtggcacaagagggagctcagattctccctagcgtctgtagcaaagaacgcagccctgccagcactctgaccttagtcttagtagaactgccatgacttctcatgtgcagagaggtcaggtaagaaatctgttcttgggctggtgagatggctcagtgggtaagagcacccgactgctcttccaaaggtccagagttcaaatcccagcaaccacatggtggctcacaaccatccgtaatgagatctgacttcctcttctggagtgtgtgaagacagctacagtgtatttacataaaataataaataaatcttaaaaaaaaaaaaaaaaaaaaaaaaagaaatctgtttttttaagccatgaattttgtgttacagaaaacatttgtgctgtgtgtgtgtgtgtgtataagcgcctttgttaaatcaacataattacattattatgtcaatgtaactgttattcacaactgagcctaacaagtttcctttttgttttttttcccctgtacttagtagttgtgtgtgtgtgtgtgtgtgtgtgtgtgtgtgtgtgtgttttaacttgtcttctttgtgcctgttgataattccttctgtaactgtgtgttgaaaatgcttctgtccacattttgaggtctttcctctcttgccctgggtccactcttctctaggcacatggctgtggttgttcctccgtagtcatccttggaactctctctacctattggttgtgactgtttttctgccttcctcttgctcagttcatccctgtggttgccctttaggacaggtgactgagtatccaaatatagtcagtgcctgggttctggttatagaggaggcctagaggctgtccctgccacttgtctggtcgagtggcggatgcacagagatggcggtgcctggcaggcctgtatcttgagtcacgtgtcaggtggttactgcatagtctctcttcagcttcacagcaaaggatcctttcccttgtctcaagtgctggttctcctgtattgtagactcttttcccagcttcctctgaggagagtgtgagaccttgtgtgtctgaaagtgtctttattctgttttcacacttaaatgatgaaatggcagggtaaagaactctaccagaacaggtcagatttctttctttttctcccccttccccaagtcagtgtcttacttgtagccttgactggcctgaaacttgctatgtagaccaagctggccttaaactcatagcaagcctcctgtctcagccttccaagtagctggcatgacagttatgcacagtcatgtccatattttcttctttttaacaaaccacttttattaaatgatgaatagcaacagggcagtggtggcgcatgcctttaatcccagcactcaggattcagagacaggcagagctctgagttaaggctagcctggtctacaggtcccaggacagccaaagctagccaaagagaaattctgtcttgaagaacaaaacagaaccaagaaaatgaggcaaataatcattgggtgcattgtcggacgttctggcagcatgcatgggctcatgggtaatgctgtggctcccttgtctctatttccatcttctgggacaggggtgtgctgggattacagacgtgtgtgctacttcctctgcctggcttttgcttggattcttgggatctgaagtcttgtcaaacctgtgtggcaagcaccttacctgcaaagccacctctcctacctacattgtggtgtttcagtatgtctgtgtcatggtccagtcaggtcaggacaccaagcagtatgtgtgtgtgtgtgtgtgtgtgtgtgtgtgtgtgtgtgtgtgtgtgtgtgtgtgtgttaggaacagtcaaactcttcttatcagctattttgaaatttacaattaattagtgttggccatagttgctctcctgtgccacagagcattgaaagttattctttcacggagctggagagatgacttgacggttaggaggagcacttgcggctcttgcagagggcctggattctgttcctggcccccatgggtgctatgggatccatttcttagagataccacatgctcctctgttctctgagggaacccatatgcatgtggcatacatagtcacattcacataaattaaaaaaataactttttaaaaaggttattacttagccagtggtggtggcgcacacctttgctctcagtgctctggcgggagtggtggtggtgcacacctttgctctcagtgctctggcgggagtggtggtggtgcacacctttgctctcagtgctctggcgggagtggtggtggtgcacacctttgatctcagtgctctggcgggagtggtggtggtgcacacctttgatctcagtgctctggcgggaggcagagtcaggcagcctggtctacaaagtgatttcaaggacagccagagctacacagagaaactctcagaaaaaaaaaaaaaattatacttgtattctggtgtacccctgtacccattaaccacgccttctccatcctgtcaccgctcccccactccatacctactagtctgtaccttatttctgtgagacccacatgtaaaaagctttctccgtcctcgtcctcgtcctcgtcctctctgaggcagggtctcactgtgtggctctggcagtttggaacttgctatgtagaccagactgtctttaaactcacagagatccacctgcctttgcctccaagtgctgggattaaaggtgtgcgccaccacgcccgaccgacttttacatgcagatgacaccttgtgctatttgtccttcctggctgacttatatcttaatctaatgtgctcctagcgcctactccagacgacagttttgttgttctgtaactgaacaatactcagttgggcatgtatcccatcttccctttatttggtacccattggcgggtgcccaggttgatccctactgcaaacagcacctcaggaaacacaggaggacagatgtctcttccacaccattcatctcttttggatccctcctataggtatggtggtgggctgctgggatcctggatcagatgctaaatcattttatccagctggccactgagttttgtgtctactaccacaatgtttgcatttgtagaagttcgttttttaaaagatgcatttatttctaacaatgtatatgtggtcatggccgtgtctgtatatgttgagtgtggacactcaaggaagccagaggtgtcacatgcccagatgctgggggtggctgttccgttgacatgagctctgggagctgaactttgtcttctttaggagcagtctgcactctttaacagctttgccatctttccagccctggaagtgctttctgttctcttcgttttcagcaacatcacattcttgttttgtggctgtagaaaccattgatgtgttttgctacagttggtttggttttattctggtccctatcttacgagtcagaggctctcctaaaatatctattggcccttggctgacctttgattaagaattataggaggcagaggcaggcagagctctgtgaattctaggccagcctggtcttatgtaacaagttccaggctaaccagggctatattagtgagaccctttctccaaagggagggagggagggaggaaggaaggaagggaaggctgggcgtggtggcgcacgcctttttttttaattaatttattaatttattaattaatttatttattatatgtaagtacactgtagctgtcttccgacagtccagaagagggagtcagatctcattacgggtggttgtgagccaccatgtggttgctaggatttgaactccggaccttcggaagagcagtcgggtgttcttacccgctgagccatctcacctggtgcacgcctttaatcccagcactcgggaggcagaggcaggcagatttatgagttcaaggccagcctggcctacaaagtgagttccaggacagccagggctatacagagaaaaaccaaaaaaaaaaaaaagaagaaggagggagggagggaggaaggaannnnnnnnnnnnnnnnnnnnaagaaggagggagggagggaggaaggaaggaagggagggagggaggaagagagggagggaggaaggaagggagaaagaaaggaaggacgggagtggccatatgtgatgattcagacctgaaatcaccactcaggtgatagaggcaagaaaatctctagtttaagaccatcctgggctacacagagagtttcaggccagcctgagctccataatgaaatcctgtctcaaaaattaaacaaacaaaacccaaaacaaacaactgagaccaactaacccagagaagtttattagaagctctgggtccaaaagacttgtcaactgtcaggtcctcgctggtgaatggacaggtggtcctggcccataaggcactggtgtgactcttccgcctttgcttcagagagagagagcggtctggatgcctcaggagcagggtctggctgtctaccactgtttccagtccagaagtcagcatttaagtaaacttacttctgctggctagaatgtcacttctacctgaaccattttggccctccagagaatctgaagtttcagctacagaggctgcaggtgggatggttcttattccagcccctctgttttcacacttgtgaaaacgcttcagtttagtcccacaggtgcctggtgctatggcgacaaggatctattaagaactactcattgaaaatcagcttttacgtgcctgtctctgatttggctgttaagttgctttcgcaatcttgaaattttgttggtaatgtcttttcccttgttaagttcgttcttgtcatttcacatctttaaaaaaaaaaaagagactgctaggttgaagaagactgtaagatgtggagtcgagctgcactgcagtcctctccaggcatggtggcacatgcctgtaatcccagcacttgggtgagggtaggaattcaagttctcagctgcatagcaagtttgagggcagtctgggctgtgttagaccctctcagaaaacaaaggtacaacagaacaggtataagggtagttcggttagcggggttcttggtacacacaaggccttgagtttcatgtctgtcaccacagaaacccagcacgtagggcatactggtcaactccagctcgtgggaggtggaggcaggaggatcgggagtttaaggatgactatttcccctgaagatcaattgatcagtgtgtgtgtgtgtgtgtgctcacatacaatgtgtgtgcaccctgtgtgtgccagccatctgtggaggtctgaagaggatgccatctcctggagctagagttactggctgttttgaggcacctggtgtgggtgctgggaaccagggtcccctggaagagcatcaagcactcttaaccactgagccaactctccagccccaaggataagtgcttttatgctgttgttagaaacattactcagggtcgctatggacatgaaagaattattgaggagataaaaactgctggtggtaatggctgggctcatggtgagggtttctgtggtgtagacttgggcttggtgagaaggatgctgtaggtgctatgggctacaggagctgctgctagcttgggacagtgactcccagagcccatggctccctgtagccaggttagcttgagagaagaatgtggctcttaagtttaggtggacagtgctatgtcctggcatggggccttggcaactaagtggggcattgcctggtcacacactgatgatttcagatgatgctgagggcttttgaggtctctgggtttgacccaggaccactgttctctgtgctgaccttttgtgaagctcaagtgtcagggacgtgggtggtctgagacatttccttcctttcccttctttcctgggtgactgcccttgtggtaggtgccctcgctttcctgactattccctcccttctcctcaggggtcagaggctcctctcaccaaactccagtacaggttcccctgtgtctctcccgaccgtggagcagactaattcccagctcgctttgtgcctggtctgtctccagtgtaagatacttgaagatgcccagtttgttttgcagttttcttgttgccctgaggttccaatagcctggcatgtgggagctgggtgacatcgtgggggtccactaaccccatcaggatctgccagctctgagtccagcattctttcccactgactgagtctttgggctgtcacccacttgtcaaaggtttgatgcggggtgattggaaacatctatggttacaaaggggaagctgggatttgggtgagatcaatggccaatagcaggagggatgcctcttggaatactgggtgggatcagttttcctctcgggctgtgaggagcagtttctgtgggcttggggataaggggatatagcttccaagagcactcagcccctcagagttcagtcatgagatctggctcacacctcagacatgtcccaactgtttgagccttagccttagcagtaaactagggaagagcttggagctttccaaatgaggtgtggtgtcactgtgtggagccactctctttgttgctgccaagctctcaggtatttgggcaaccagccttgaacccagtaccctgacaagcttaatgtagggagtaagggtcctcctttacggagcctctcctgacagagtgcagcccttggacatagcctctccagcagggcttggcttttaacttctaagtccctttctcctggctctgcagtggcccctcccagctccagcttcctcccaccgctgccagtgcagagcccaaactggggcacccacctcccaggctatcacatctctggggaagggacaggcccatgggaaacccaagcctgggcagctcccgttcctggttttccagggagccctggcagagggggctgggaagaaaggcccaacagggaggggagctgggaagcagaacagggaactggaaggggaagggtgtgggtgggctcggatccagcctacctcctactctcccactactgccaatcccctccctggcaggcacacactcaaggcaggggcttggcgctgtctcggggtagggggttgggggggcaggaaccgttgtgtgtctcccgtagtgaagggggttgatttgtggcagtaacacacccaccctgagctgtggcccgaggctcaggctttgttacttcactggcttgcagcccacacctggaagtgggggggggggggggagaagaaagcccctaaaatacagctctgtgcgcgtttggtagagctcaaggcccccagttctgactgcaaatggggccatgagaggggcttggagagggnnnnnnnnnnnnnnnnnnnnggccttgggcctcatccgttggcacccagagagcacagcaaacccggcatcccagaccagcctgggtccgggcctcagctttatcagtagggtgccggtcctgggcaggctgagcaaaatgacattcatttcactacatcctgtggctgctgctcacttcctcctccactcgaggagctgtgtgggggtggggggtcgggtgaggacagattagaaggaaaatgtagctgggctgggggcctctggtggtggctggggtttcccagggactggctggggtgggaggagggtttcggaagtgttccgaggggagaaaagctgaggggaggagcaggaggcctctggcagtctcagcagtggcacaagctacacctttgagtttctgaaagggactgtcatagcacccaggctcttagaggaagtggaggctgcctcagtttctcacactctggagtgctggtgagactgggagaagagaggtcagaggccaggctggccctgggctggaggctaatcttgggagggtctgtgctgtgccctgctgaccaacttctcttccccacaggcagagccgcctgaagcccagcgctgaggctgcacttttccgagggcttgacatcagggtctatgtttaagtcttagctcttgcttacaaagaccacggcaattccttctctgaagccctcgcagccccacagcgccctcgcagccccagcctgccgcctactgcccagcaatgccctccagcggccccggggacaccagcagctcctctctggagcgggaggatgatcgaaaggtgagcaactgagtttggttctttaggagactctgtggctggtgcccaggaaaggagaggggcctgtccccacatgatgacagcttaggggtgccgacctgttgttgtcatgggtcacatatactcctgccaaataggtgcttggctgggaacctgattataagctgaggcaggaatatgaaaccaggcactctggttgcaggaccatagctataaccactgtggtctctgagggtcaactttgaggatcaacaggcccaaactataggtctgtgcagcttcgaggggtcatccttgcagggagaggggatccaaccctgcatttctttgtggatctgccctatactagctgtgagacctcaggtatcattgcacctctgtgttggagttgtctgttggcttctgcatttagtagctttctggggcactgtagacatgaggtgaacagcccacacagatattctagcacgtggctttgttcagatgttcaggagcaagtgacatcatcgacctttggagataatgatgtcccacccacccaggctccaagtaagagtcactgggtaacctttgaagtggctccaggccatggaaccagtgactctgtgttttcagagtcccctgagaggttacctcttcaccctgctgctgaacttcaggttgggatcaagtcagtcaaaagggatcaagatggatgggaacccctgaaggggccacaaaaagtcaccttggagctgtggccactaactccagcactggactctgtgtcccctctgtcagtctgtcaacctcactgtcctgcctctctggatccctgggagaggtgtgtgaagtttgttctcctgacaagagatgtccatcacacaggcaagggccagcagctgggagccctttcctgccttgttcatccttagagtgtgtttctgtgttctcggtggtttccacccattgttctgttgtcctgctggcaacccttgaaacaactgaggtacaacaggtggcctagtttacagaagggatgctgagcttagtcagcagtaagcccagatcggggtctgccctcttgcctcctggatctgacgttactataaccacccatagtcctgatgtagccaaggaccccatccccagtatatacacttatatgtaggtatgcacacaaaaggtccaggagcccagcctacaaccctgcacagtgctgtgtgtgtgcatcggtagtcatatgttctgacaagctgggagtcattgtgtgtccctacacaggggcccttggaagttcttagtttcgctgctcctcccctttagacatggtctctcatgcagtccaaactggtcttaaatgctcattggagaaaaaggatgaccttggtgtcctgttcctagccttccacttcctgagtctgggccaggcttgtgccaccccgactggtttatacagtgttcaaacccagcctagtgtgtgcaaggcaaacactctactcttggagctacatccccagccctccagcctctcctttgtgatcccattggaaatgactagatagtctaagttcccttcaggccttctgaactcctcttgctctgaactcaaggagtgcacagtccctggccataatggtggcaatacttagtttcctaaattctgcaatggcagtggtggtatagctagttccctcctttctttgggcctggctttgtttctctgctaggctgggtgaccccgagcctcttctgccctggctccatgttctgacggatgctgacacacctcacaaacacacccccacagctgggacaaactcctctcatcagactgtgaccccatgctgcacagcagcaagtcatgtggtctctgtattgtggatagttcgctttgaagcagaggagggaacactgtataagaaatcagaagtcccaggccccaacgctggggctgcctcttcagggagatgtgacttcaggacatctgggcttgtgtttgctcagctggaaaatggggatagtaactctagccttgcctgtcttacagggcgcctgtggaagtcagctgaggtcacgggcagggaagtgccctgcagacagcaaagtctggtccaattatgagggattacgattgctattattatctacccatagtaactgctctggctctggtggcaacaaacacacgcccagacctagattctgggactgatagagtgagcgtattcgcatactggcaggggccattataccaaaagatgacagcaatctggttagacaaaggctagagcctggctgggcctcctttcaaaccacctacacccacagcacatatgctggctcacctggcaccacaggctggctccaacagagccacctggtaaaggcaggtagagacactgacagttgccataatggtccagcaagcctgggatggggacattgtatagttgtatatgggggacatggacttgctctacagtccaagaatctccagagatgacatagacacctggcacaatagagccatctgctgagcctgaggggaggggtgaggctcctgcgggcccttctcattcagcagccccacctgcctggctagccttctacttgcaggctgcggataccatttattgcccatcctaggttttcaggcctttgtttttgccttacctctcctgctagctgcttccttgttcagtcccctctctgggaaagccctggctgtgctctcttggattatagtttgcagactaattgtcctcagctgtgactctcaaatcaaccatttcagcatcacctgtgaacgaatgagagctgcaaggtgcaagcccctgctggacctacagagttgagatctctggggttgggaccctgggagtctgtcactcagcccaggagggtggggtctccatcccgctcttacatgattccctagggtctgcagtggcatgaagtaggaggaatgccatggatgggagccaaaggcatcatcacgtcccaccagggagcccagggccaggcagatggggtgtggagttgggtgacagacagaagggctgtgcttgtctctgagaatacacagagagatttgtggaggtgagctctgcaccctgccacccatgagctggaaggggctgctgtttggggaggctacctctgtgaccagggcgatctctgtgacctccatgctgccctttcctctggcttcagaaactttgtggccgagatgcactgagcattgtctgttggctaagacactctatgaattattttaattcttataattgccccaaaaggcactgatattttcatgattctctcttattaaggactgaattgaagcttggagatgctaagtcactggcttgaagtcttccagtttgctgttcagggtccttcaaggcgaagagggtggaatgagcagtggcttccatatgtgctgctctgcggtgttgcatgggtttctcccgctgcgagttcaagggtgtttatttagaatgaatgttgggatccgtatagctcttcacatgtggatatcgaaggcacatccagagagagagagagagagagagagagagagagagagagagagagagagagatcttccttataaaagacactgctgtgtgcacccaactgttctctacccctcactttttgggtgtactgtttcttttcttcctccctccatccctgcatttcttcagacttccttacctttctgtgggcttcacacacacagctcagttccataagtctacagggtgaaagggatggtctggaggactactgaaaaacaggggtatagaccacagaatggtaaggccgtgccgtgtcactcaggcaggtggccccttctacctttcctgttgtggagtagaggagactgcagtggtgcggacttgcgctagagagctcaaagtgtgtgtgtgtgtgtgtgtgtgtgtgtgtttgtgttgcctgtctgtctgtgtgtttgtgtgtgcgcgcgtgtgtgctgggagtagaactcaggtcctctgaaagagcctatacacacttttaatcactgagccacctctcaaatagagaaaagctgattttcttcgttccacgtgataacagcatgtgcacatgtacttagtggagtaattaaatacttggcactaagcaggcttgtgatgtacatggcccgctagagctgaccagggcccaggattggcttatattgtctaaacttctctaagttagatgttatgaactggcaagtttagccatgctctcagcaaagcctcgggtagggtcagccaggccctggatacagacctgggtttgtgtcagggcttcctgcgtgactcagctatctgaggagccagcaccctgcccacctgcctgcctgagtgtggcgttttggtgagatggtgctcatgagtgattggttaacttagggacctgccacatagtaatttagcctaattagtctagctctggatcacttatttgtctacccacttgcctccctccctccctgcctccctgtccctctctgggctgtgagggaaaggagccatggtggggtgtgtggagtatggcctctagagaccagcatatgaaaagaagctttctccaggcccacaggcacaaaaagcctgaggcctgttacccttgggacagaagggaagccaaggcaagtgacagtgagacctactgcttgctgtggttagctccaggagtctgagcaggggccacagcccggcttacagtagcattggtctctcaagctttacatgctaaaggaaggattggagcccagccctgttaggaaagcagatcccctagggtaagtgtggggaagactggaatcagccatgtagtgggaatatggaaagctgagcttagcaagtgtctcttctggcctgggcccaggaggcctggttgtgcctggttgtgcttccttgtagagccatgggacagttaaggtgtcagccatcggcattgtacttcactgtagggtatggcaagttagacatcaggcatctcctttacactgcagttactgcaattgttcatagtaacccgggaagcacctgctacttttatccccattccacaggtggggaaccaaaggaggctaggtaacttggcaaagcagtttcatctagactagctgcttccgtaagccagaggacatccagagccacagtgagctgctgaaggagccgacatgaatatgcttatgtccatgggactggttgcaagcagaacagtgggtgttccacttgagagctcaagactgagttcatttgtatccagcacacagtaggtgctcagtggatattttccctgttgcctggcctgagagtgagggttgagatccagcctactatgcattcggtccagaagtaggtgaagcaagtagcttgtggtgacaggatggaggtcctggcaggcaaaactagttcttgctttgctttgttttgttttgtttgttttgtttttcaagacaggttttctctgtgtagccctggctgtcctggaactcactctgtagaccaggctggcctcaaactcagaaatccacctgcctctgcctcccaagtgctgggattaaaggtgtgcgccaccaccgcccagcagcaaaattatttcaaatcctttaacatttatgaagcacctgctctatgcaagttcctatgatctgtaggggatcccaaaagggacactaaggcatggctcctgtctccagagaagtggtggcctttggctaggagggataatttctttctatcagtaattatcctgtgaagccagtgactgtttgctgactactgtcagtttctgaaatgaagggctgatgagctttcaggggtgagtctggaggtgcctctagcagttcttgtcattcacaggacctcagcctctgtccgttgccatggagcaagaaccacctctaaggggtgaggcatgtctgcatgtgaacgtgtgtatgccttgtacaggtctgtggtgccctgctagggcttctcaagcaaggtgctcaggcagcccagggcagggctttgcctcctgcagaagacaattccgtggccacagacagttcctgggaggtcagccagctggcaaaggctgcatgcttattgtcctgggaggcctgggcaagtagctggctagatctggcaagttcatccccttgactcaaacaccaacttgaggcatctgttcagattctgggtcagtggcttctgctctcagcactaacgggagcatggatgtctctctgtttctggggaagggcttcttttgggggacaagagcctatgcctaggcccagagaggcaagtgtgtgtgggtgtgtttgcatgtcagtgaataaggtgtgcattcagtatgcactactgtgttttcactgtgtgtgcatagaacatggcataggcagatatagaggcttaaaagacccgcaggctggaaatgagaagctgggactgttgattcttaaggcttcgcctttgccttctgcaaatctcagaatcgctctgagcttcactttaccacctgtgtgatgggagaacatgacacctactgtggtttctgtcaatcataaacataaaatgaagagcaggcttgtaaccccagcactcgggagatagaggagagaggatcagaagtccaagcctgtctcagctgcctgtcgggttccaggctggctcaggcacttgggagcctgtttcaaaacccaacaacaaaaaagcatatgtggaaatcctttgctgattttgctgtattgtacaaatgtgagcaattattggcatagcccagcttgtcagaaggcaaagatgtgtgtgacttaaaataatccatccagtgagctgtgctaaaatgtaggtcaaatcatagcctcagaattttagagtgaggctggtgggaaccacttaacctaacagcccaccctagctgaaggttccccaaagctgtaaagacttccagaaaaggaaagtgacaattccatttaaggtgtagatgatctgtttaaggttgggggttgagcagatccctgacacttgagacgtgcagcctggaggaccacaaactcatggacactctgagttatacagtgagagcctccctcaacacacaatgcaaaacaaaacaggtgtgctggctcatgcctattagcgcactgaggagggagactattgtactttgaggccagcttaggctacataataagttttagaccaggctgggctcaacctgtttgtgactgtggagacatagagatctatgtgcctttgtgccctgtgcgctgtaggtttgtatgtgagtctcttttgtgcatgtggactctattcttttttgtttgtttgtttgtttcgagacagggtttctctgtgtagccctggctgtcctggaactcactctgtagaccaggctgacctcaaactcagaaatccgcctgcctctgcctcccgagtgctgggattaaaggcatgcgccaccacgcctggcgtggactctactctttactgagtatctgctatgtgactgtcactcatctaagggttgcccagtatctgtcaggctaggcttttttttccttttcttttctcttcttttcttttcttctcttctcttttcttttcttttcttttcttttcttttcttttctgttgttggtttttagaacagaaactcaagtactctaggctggcctagaaattctgaccctcctgccttcacctctcgagaagtccctgctggccaagcacattagtgcaccggcactgggaggcaggaggattgcaagtctgaggtcagcctcaaattcatggggagactctgcctccaaaatgaaaaacagcagctctggttactcgattcaaagagctcatagcattgcaggggtgggtggctgtcaggacctatccgttcagtctaggtagggaaagcaagcccgggaagccttcagggaaggtgggttaggcaggaggagtagctgtgcctggggaagcagctgcttttgcacccgctgcctatgttggggccctgggatagaaaggaaacacaggcagttcagcaagagcccagggacctttacaaagactaggagttgggcttgatcctccaggtccctggggtccccctcagagagggttaaagctctgtagaatgacatagtccaccttgcaatttggaaaagtctgccgccccagcatccacatagctcaccatagcaacggcggtagccagatgttgggatctgtctgcttgtgagtgatggctgcacatggaggagagagagctgggatttgctggaggccaggagggggcctctgctggcgggctgggaatgctggcccctgtgaaacattctagtatggaggcaggaggaagtaagccgttccccagtgactgtcactgttcccagcttcctctatcgccttacttagttctcaagctccagctgtggagcaagcatgatttccatcttatggataaggaatgcaggctgcagagaggctaagttcaaggtgactagtaaacagtgtaagttcctgctcagcccagccctgctctttgcaaaacccgtctataatttctgcccccccccactcctgctacagttcttgaggggctaattgagactcctccctctccnnnnnnnnnnnnnnnnnnnnctcccccctctccccccctcatctccccttcccttttgtctccccctcccctcggatgaggaggccaatctgggctcaaatctgttcccactaaatgtgctgctgtttccagctgctccggttactacagcacaggttcttgcatttcagtattagctgacattcgacgacatcggtgctgcttgcagatttgagaagcatagcccacattcctttgcttaacccgtcttaggcactgacaggcccctgacagatgcaagaataaacctcttgatagaccttcctggagtcactgagggcatggcccagaccatctgtccacccaatcagtgtatcagttccctgcccagtggtacgaacagcccacaggcaggctcagagcagaaagcataccctccattttagaatgctatattgataacttgctttccacaaagctgtactgagcttcatgggaaggtgggagccaaacctagatatgggtccagcagagtaggaggtctgttctgtgcacatcgtgcttcctgctgggattggggcccaggcctggtgctcttcaagtgctggtaaggtggctgcttcctcctaggctggactagtttggattgaagccagcagggacaaagtgtgctgactgtgtgtagcatgcctggatagcttgtatgaggtaaagcacgtgagcagcacatggagggaccatgtgacatagggttttcacacggagggaccacgtggcatacggtttgctgttaaagaccctagaggcctttcccatggggtcatgagaacaggtgtttgtctgtaccagaaggtcaagtgtctttggtttggtttgatttctgattttgcttgtttttgtagtagccaaagatggttttgaactctccaaaaggcaaggataaccttaaatgtataaccttccacatctgcctctccagttcaggcattgcaggcatagattgccatacctggcgtatgcagctggggacccaggcctcagttccaagcacactaggcaagcagtctaccaatctagccaaaatggctttggttttttgtcattgctgtatggtggccatgttttctttttcctgatgaaagactttcactcttttttcagacagaatctagaaagtcaaacagatccctaaaactgtgataaatgtagtttgctagagaaataatagttgaaatcccagagtttctgggtagttgtgctctagcatccgtcctaggggctgaggtagaaacagtgaatggagcagaccacaggcctggtacttgttcactttgaaaagcaaaggcaggcagacggctgggttcttcccccgcctgtgaataggaagcgaggctcagaggatcccacgacgagggccaggggctggagacctgctctagtcatgtctgtgagctcacactttcctgatgttttctataaagacagtcacagctgtggtagaacaaaccaaaagcaatgtctcactcccagagatgccaaggtaacccgcgcgctctgagctgcgtgtgtcagatttgatctgtgcgtccccactagtttcttgaagaggcatccttagatcctcgggacacaactcaacagaacaactggacagaacaacagctggcttcttatggacatgtgtccttgggctacctgaggcagggccccttccgtggcccatctgtctccctggagccttctagcctcacctctttgtcagcctctcctaaaaggaacacccggaggtcagtggtcctggaggcagcctctccctccacactggagcctctgcgtcctggagactttgtgtctgggctccttacctggttctccagcctttgtcctcaggccattgtatcttgcccagtggcggccctcaaagccagctctgaccccattgtatcaggtctcttgcctactagcccttcctttctcctacagtgcactggagacctctcctgtgcctctgtctattctgtctcctttgtaagctggacagtccccaccagtaggtgccgaggtgtgcctgtctgtcacctccactcacagctcttcagaggcctgttagaacttgagatgtgattgtctgcttcctagacataccatgagtggatggatggatggacagacagacaataggtcattattgctcttgctgtgtgtcagaagcctgtgattggtcacagtaggtcttcagtacatgcccttccaatacctgaaaatcgatgtggtgagccacaaactattttgaaatcacagaaaatgaaagttgagtgggatgtggaggaccatggcaaatctccaggaagcatggacgcccttgccttctctgtccatggtaccagtgtctctttggcctggctttctgcagtgagatctgcaaagccattttcagatgctaatgtcatgtgaggctcgtggagcagtcttcttggtcaagggctctctccccttccccaacattgtttctgccagtggttagtcatgttggagcctgctgagtcaaaagggacttgtgggtggtttgtggccaggctggagcagtgaggcaggactttctaggtatgcagctctgccccagaagatgtgcctggaggtctcagccctgagcaggttttgttgagtaggagcaaagcagaggttccatagtctccaagacacttctgtggtgtggtgatgtcaatgtcagggccacatggaccaggctccaggcaggagtgtttgcagcctgaaggaaatgcctgtgttctgcacagtgttgcatgcattttaaactatgtcactaaagtgatcatttgatgatattttgttttcaataaagattcattaaataccttgctgcttgaatgtctgtaatcatgtaagttttttttttccaatcatagaaataaaatcaactgtggtctgggaatatgactcagtggtagagcccttatgtagcaaatatgaatccctggtttccgtacctagcatccaaaccaaacagactcagagcctcgtattaggatcttttgttccttcattatttttttttttttgctttttgttttcaaaacaggctttctctgcatttctggctgttctggaactctctctctctccctctctctctccctccctctctctccctccctctctctccctctctctccctctctctctccctctctctccctctctctccttctctctccctctctctgtctctctctgtctctctctgtctttctctgtctctctctccctctctccctctctctctctctctctctctctctctctctctctctctctctctctctaccaggctggcctggaactcagacatctgcctgcatctgcctcctgcctagccgtgttatgatcttataattaggaaaaagtgggggttggagagatggctcagtgggtaaagtgtttgctgcttaagcatggtgaaccaaggccaggtccccaacacccacatgaaaactggggaggcggtgctagggagacagacaggaagaccctgtctcaaaaaacaagggttcgggttgttgatatagttcagtggatgaagtcactgggtacaaagcctgaccacctgagttcaagtcccaagacccctcgatgagagaataaatacctgagagtcctctgactgtctgtcacatgtccacttgtgctgcatgtgtgtacatgcccatacacacaaataatctatgtaataatttttaaggacattatttttggggctggtaagatggctcagcggttaagagcactaactgctcttccccaggtcatgagttcaaatcccagcaaccacatggtggctcacaaccatccttaatgaggaacaaaaaaaaaaaacaaaaaaaaacaaaaaaccaaaaaaccaacaaccaaaaaaacaaaaacaaaaaaacccctatgggccagaatgatcggggccagagtgaaagggaagggggaaaagacattttttttaatttgtttatttgtgtttttgagtcagagtttctctgtgtagccctggctgtcctgacacttgctttgtaggccagaatggcttcaaattcagagatccacctgcttgtgcctcttgagcattgagactaaaggcatgtgccaccaacatacctggcttaaagaaattctattttgtaaaggtggagagcagttgtggataacacctgattggcttcatctccacatgcacacaatacatgtatacatacatgcacacacctgagagagatcggcttcatctccacatgcacacatacatgcacacatgcatgttctctttgtgtgcttaaagccaagtatggcggcacttgagcactcagaggtggagacagtagctcaaggttggctacagagggagtttgaacctagtcagagttaggtgagatcctgccttagaagctgtggtgaaggcagaggcagatggatttaggtcagcagcctggtctacagagtcagttacagaacagtcagggctacacagagaaaccctgtctcaaaaacaaacaaacaaaccaaccaaccctaataataataataataataaattttaaaaaagaagttgtgaatggaacatataattttttacacacacacacacacacacacacacacacacacacacacacacacacacacaccaggcctggtagctcatgccttttgttttgttttgttttggaatgatttatttatttattttatgtatatgagtacatcgttgctctcttcagaaacaccagaagagggcatcagacccccattgcaaatggttgtgagccaccatgtggttgctgggaattgaactcgggacctctgggaaagcagtcaatgctcttaaccactgagccatctctccaacccggaacatatatttttaattctggaactcaggagacagactcagatggtttcttgtgaggcctagtctacatagcaagttcaagggctactagagttatatagtgagatgctatctttaaaaaaaaaaaaaatcaaagcacacagtacactcattagagggagtaatacccactggaggtccctctaggatttagctgcctattttatttggccaacgcttggaattgaacctagagtgttgtgcgcgctaggcaaatactctgtcaccgaagctgtactccggccctctggatttactgggatggggttcaactttaccacacaggagggttggggacagcatgacacagccctggaaatgtgactgttgtgggggtagcacaggaggaggctcatgccaatccaggtagtctggaacacagtccctctcgggtcagctctggcttacagggtgtgtctgtgtccacaggaaggagaggaacaggaggagaaccgtggcaaggaagagcgccaggagcccagcgccacggcccggaaggtggggaggcctggccggaagcgcaagcacccaccggtgagtgtcctctctcacatgaccgtgcctgtgctgtggacggcagcgatgtctatccgaaaggccttggggacatgaaggccagatgtagggctttgttacatcctccatctttgaacctacttttcctttccacatttcctccagttttagactagaggccaggaacttgtctgtggatgtgggagctgagatttcaaccaagctctgacccctggcttcccactggaagggtacccagaaagcctgccacattccccatctggactgagagcctgagtctggacgtgtgggccctgccaccaagctgtacactagccatagtcctctgttcccaggaggacctgaggctagacagagcctgattccagaaaaagggaaccatgcagcctgagcttcggcaagaggccccaggcattgctgaaggcctgcagggtgactggcagtggtgccgctggccccatgctgaggtctgggggagctagctacagggctgctcaagatggagagagctggggggtatggtggagctgtgggctggaagagcctgcctccctcaggcataagggtggataattatttcctagcaaagccagctggttcctttctcttagccctaccagcagagaacgtaaacttggagcaggaagagcaggagggtgaaggggagccgcagccccagattggtaacagtccttctttggggcaggtcagcaggtcagcagggagtagcgattttcacacatctagttagggagatggctccagagaggtcagaggctctgggaaccttcggggagcagatggggaccacagccagttctgcatgacacaagagggaaagggcggaagttaggtaactagctggtaagtaatttaggacatcttaataataaagcacacatggatattttatggcctgtaatgaaaaatccacctgacaatggaagaataaaatgatggttcaggagaattcccagtttgaggcagctgctcagcagattccccatgcttctgtctttcaccctggagcaccttgaggggtgaaggtgtgtgaaggagcagctggctccatttgactgtgggcatgtccttgccccctgagccacctcggccatctgcagagcaaatttctgcactccagtcactgagaacccagagccaccacatgtaacaaataaagagccagtgaccctttgactccaatttgtcagtctggaatcaaaaggcaggagcagcaccgagagagggtgagtgtgtggggtcagagggtatgaggaaataattcgccgagggaggactgggcgggagtcattcagcctgagtccagttttggtgcagaaagaaaaatactgtctttggagaccagcagacccggttccaatatccacttcacaacctttctgagcttgaacaagttacagccagaccgcaggcagggtgttttccttctagggtgcctgagatgaattcagtccgctgcagagcaagggctagactcatccctgcctggcaccgtggcaatcacagtttgacaggagaaaggatgtcatggttggcgcttctgagctgtgtgacctccctgataaaatgggctgtcaggaatacctgtcctgtgtacctcctggggtgcttgcaaacagcacagtggagcccagatgggcagcgtgtgccagataataaacttgcataatttcagtgtccacagaccaggctgtgggcttttggggtagggccagcactgacctctcagtgcacattattcaaagcatcaagtggatgtggtccagctctgggtgacactgcagccacctgtactctgaggagaggccccttgaaaagctggtgccactgaggagtctgggacataagataaaggagacttggttggtagagtgctcacctcgcatgcatgaaacactgggttggatctcagttctgtataatattgggcatcgcatggtggcacttgggtgtggtggcaggattagaagttcaaaatcagaaggtggtagtggtgcacgcctttagtctcagcacttaggaggcagaggcaggcagatctctgtgaatttgaggccagcctgtgagttgcaggacacccacagagaaaccctgtctcgaaaaatgaaaaaaaaaaaacaaaaacaaaaacaaataaaacaaaataataataataaaaattcaaggtaagttgggcgtggtggagcacgcctttaatcccagcactcgggaggcagaggcaggtggatttctgagtttgaggccagcctggtctacaaagtgagttccaggacagccagggctacacagagaaaccctgtctcaaaaaaacaaaaacaaaaacaagttcaaggtattctctgttaaatagtgagtttgaggccagccttggctatgtgagacccagtctaaagagttaaatttaaaaaaaaaattttaaagatttatttattttatgtatgagtacacactttagttgtacagatggttgtgagccttcatgtgattgttgggaattgaacttaggacctctgcttgctctagccaacccaacttgctccggccaaagatttatttattagtataagttcactgtagttgtcttcaaacacaccagaagagggtatcagatctcattatgggtggttgtgagccaccatgtggttgctgggatttgaactcagtacctttggaagagcagtcttacccactgaaccatctcaccagcccctaaaatttttttttgtaatggactggagagttgacttagctggtgcacctgttactcctgcagaggacctccggtttgacttccagcatccattggtggctcacaatcatatgtaactccaggttcaggggaccagatactctttctgacctccaagaggaccaggcaagaatggaactttatgtgttggagggaacagaaagtcagcttatagactgcggcttttactggcaggccacctggcgatgtttcctgttactgcaggctactgatggcctcagtctgggttcctagctctggtggggcaggtgcggcccaggttttctcctccctcctggtgtccttttctcctttgcagcagcgctcagcaggcttctgtgggtctgctgcagccctggaattagattccctaggagctctggagcagccctgtgtgtcccaggcaggtctgaggaagggcagtgagctaacgaaggggaagccgagaaagaggccaagtgtggccaaggaggagaacttcgatcatgcgagctctactctgcagcactggacagaggagttcaactacacatctgggcctccccagcccccaaattaaacacctttggcgccttctcaatttgtccccaagcctgtgcaacagattcttagacatctgtccttgggtgctgctgtgttagtttcctagctagaggagctcacttcccagaacccactgttgcttcttgcccttcacatggaaacttgccttccaatctagagtcctggagaggcgtagtcacaatagtaagctgcttagcaggtctgttcttgagagtctgccatctctctctctgtgtctcactgtgtgtgtgtgcgcgtgcgcgtgtgcgtgtgcgtgtgcgtgtgtgtgtgtgtgtgtgtgtgtgtgtgtgtgtgagagagagagagagagagagagagagagagagagagagagacagagagacagagagacggagacagactatgcagccttggctgtccaggaactcactatatattaaccaggctggccttctggagtactgggattacaggtgtgtggtgtgtgccactgagcccagcagacttccatttctttctttttccttctattttatttatttttatctgtatgggtgtttttcctgcaagtgtgtctgtgtgtcatgtatatgcttagtgcccacagaggccaagggagcagaggaggtgttggatcccttagagctgtagttaacaaacggttttgagctgccatgtaggttcttggaatctgagtcccaggtcctctagaaaagtagcaaccttaatggttaagccatctttccagctctaggactccctcccttctccccttcctctgtggctccttcccttcttccttccctcccttcctcccttcctttctttctgttttagtttttcaagacagggtttctttgtgtaatagccctgctgtcttggaacttgctttgtagaccaggatggccttgaactcacagagatccatctgcctcagcctctaagagcatgtgccaccccacctggctcatggactccatttatcttaagactggagagatggctcagtggttaagagcactggctgttcttccagaggtcctaagttcaattcccagcaaccacatggtgactcacaaccatctgtaatgggatctgatgccctcttctggtgtgcatgaagacagagtactcatacacataaaataaatcatctcttaaaaaaaaaaaaaaaaaaaaaaagacaagatccagaacactggccctgactttctggctccttcttgtccccttttcctgccccctccacactgtgcccaacacttaacctgtcttggacagaagaaccttgtattcgtgctgccccacagggtgctccaggcacattctccctacttgtgtggtctgatagccctccttgcctcttcccttggagccaaaccccatcaagcctcgcttgaaagtgaagcccaggcctggggtgggggtgggggggtagttcagcaagcaaaggtacttgcttgaccaaaatggtctgcacgcctcaccaccagagccatgggtgctgcttgtccgcagagaactctgagtcagtgtctaggagcttgaggtttctaaactgcaatctcatttatttacttatttacatacttactcaccgagtggtactcaaacctagcttacacatcttcagctgagtgctcagcccctgagccccacctccagccctggacaccctctcccctcccataactcctcccaccccttcttttaataatgaatattagtattcatgtttgttggttttttttttaaacaatgatacactttcttagcaaatagagaagttagaatccagccccatcgcagctcccagtgctctcctaaatcagatttgcttttactctggataagtagagcttgttcctccactggctgattggtttttgagatagacactttgtagcctgggctgtccttgaacttgccacaatccatactggctcctttgcatgtctggcaaatagaacatatttcattacctacaatcgagcaatgagaataaaaaggctaatagcacagcactttgttgcctgaaaaggccggttcaaagacttacttcaggctagcaagatgactttgtaggtaaaagcctgaagaatctctgtgggatggagactggctctcaggaattgtcctccgacctttggaagagtgccaatggcatgaatgtgtggtgtgtgtgtgtgtgtgtgnnnnnnnnnnnnnnnnnnnnnnnnnnnnnnnnnnnnnnnnnnnnnnnnnnnnnnnnnnnnnnnnnnnnnnnnnactcattcaagacaattacgaatctgaccagagttccaatatttgtcccttgactcttgcacatttggagtaatattgacacacacacaaatgcacaagctctcacataccccaataataatgaaaagactcacttcttggaccccctactgtgagccccctgcttctcttctccctgggagcctgggtccccaaagcctttttaagttagtatatgaatgcagggctgtttgaaagcaagcatactgtctcaaaacacctcagagaaagctgaggtcttggtgtgtggcgcattggtagcattctatatacatgacaccagcaccacataaacatgcctgtaatgccaagacttgagatatggaggatcagaaattcaaggtcatcctgagccagcatcaagttcaaggctagccttggccacgtgagaccctgtctcaaaaataaaaaaataaaagaaagaaagaaaatgtaactgagggagaatatgacacaaatcctgggactccaggtatagctggggaggctggggtggtacagagcctgggaggtgaagctgcttcagagtaggcctgggcctgccgtgttggcagcattgccttggggaaagctaagatactgcaaagcaacaggaaacaggaagccagctgctgggctaggagggccttaggaagggagctggcacctgggccagggcctgtgggctggggaggaggagactggcatgtaaaatcaggcctgtgtgtgcggctcagtggaaagaaagggctggtgccctgctcaccagctcctgaagaccctgcactgtgacaagtggaactgtggtcacaagcccagacagctctgcagaggtctctgttctttgtgggtagttctagctggagcagcagagggacagtttctgccttggcccaccagaccctgtggttggttggtgggggtgacaggccctgcaaggtctacaccctgtttgctagcggcatgcatatcagtggggatttatacccaccaacttcctccagggttatttttgcttggagggtgcattctgaggtcactcttgctaagaataacccagcaagggcgggaggaggagtgggtgggagctggcgccaagctcagctgaggcaggctgggctacttactccacagcagcctcctgcacagcctggaggcagtgggttacagagggcagtgctatagggcagaaggacagaagccaggggaagccaggcagcgctgggctgagcctccactgcctgggcagttttccggctcccagggctttgcagtgtggcttattttccagtctaagagccatttggttcttctccaacagaactgaatcctctcctcgtttcaagaccagtcctgcactttgctagctctttaagcagaggcttgatggccgctctcccttggttttaggctctcttagtcctgggctgctgctcctggtcacaccccagcagtggccttccagaagacagctgggatggtgcatggggagtttaactcttcctaaggtttgccctccagagcatgcaagaaaattctgagggaggccagtggtggcggtagtggggtgggggtggggggtgccagcaggtgtggaccttgagggtcaaagaaaccagggaaaatatactgggaaatgtggggcttccctggcccttaaaggagggcaggaaccaaggggaagtggcaggtcctgctgaggcaatgctgagcaaggtggggcaggcagttccgttaaaaatgagtcttatctggaaagatagtatgcaagagacctgagggggtttactgtttattttatttattttattttattttatttgtttttggaacagggtatcctgaaactcacaatgtagaccaggctagcctcaaactcccagagatctgccttctctgccttctgagtatagagattaaaggtgtgtgtgccactgtacccagcttcttgacaggcatacacagtcacaccttgtattctaactctgtatcctttaaggcctgggaataaagggagcattgagcagaggcaaatcctggcctggtgaaggtatagaaaaacagagtgtccttcgctggtcagatgatggagtaaaaggagaagcccaggccccggcagtggctcaagagggacactgtcagggacactgttgtcagagagcttctgagacagagctgctagagatcactgtagatggcactgtagatggctgctcccggcattgggggtggagctcaggggcagagcacttgccaggcatgctggactccccatcaacatgggaggaggttgggggaagcatagctggtgttactgggggattattccaatgaatttaaaagagtaacaaaaaccaccttgatttctgccccatcttgactccttgccagaggcacacagtctagggccacttgtaacaatgatttcaggtgtgttggtcccagctgctgtgtcctccttggggtccagccacaccagcctctcttctagcgtacagcgctgtccagtatgtgttacctaggagatggcctgcttccctgttgttaccctcacctagacactgtgtacctgagatgcttcacactggctgccaacctgacaggactgagactcgtctaagagaataacctctgggtgtgtctatgagagatgctagtgtgggttcactggagttggaagaaccaaccaggatgagggaagcaccattgcttgtgtcgagatcctgaactggataaaaacggagagagcaagctggctgccgacatccatctctacttcctggctgtggtgcaatgtggctagctgccttcagctcccgctgatgtgatggacggcgtcctgggatgaaccttgccttccttaggttgcttttgtcaggtgtttcgttgttgttgttgtttgttttgttttgttttgttttcattaagaatattaacagatgcaacacacacggcagctctttgcacctcaggaaagacattatctgagaagccaggaaaggatagggaatgaccaagtggaggggacagtgctaagctgggacaggtttaacagagagtggcaaagactctggagtggcactactagggtaggatgagcatagtactttaacccccttggctttgctttgagaggcatggcctcaccaagggcaggatgggccagagttacactgcagcaaagttagctgaagcatggcgtgggtggcagggacttcgaactggttagcgtctagccaggccctgcaggaggatccttgattggcacctagttcccccttgaactggggggtggggggtggggggtgggctacccttcttttcacggtaaagcttacttgcctgtgagggaaactcagcctgggaggtccttcagatggctgtcctgtacttgggtctccctgggagctttgctgaagagtatgagggatgtgtgtgagcagaggccagccttggagccatcttcctcagatggattccacatattgctcgggagccttgagacaattaagttttttgattctatcaaggaatggatgccatgtcctttgctgggtgctaggatcctggagtagagaaaggaaagacagagcccacagtccagaagggaggtacactgtaaagaagccattaccccagcatggtgaatgctggaatggtgaataggagctctgtaaacagtgtggcctgtgggtgggggtggggaatgccacaggggacacagttctctggatgaggctgggcccagcagctgtccacatctgtcatctatatggcgagggctgtgggagtgaagcataggccaggggttaccatggggtgaagaacttctatgtggggtgatggtcaaagaatatgaatgtagtcgatgtatatttcaaaatggttaaaaagacaaattttatatatactttatcatgaatttggggcggggcggctattcttatttatttgtttgtttgtttgtttgtttgtttgttttggttttttcgagacagggtttctctgtgtagccctggctgtcctggaactcactttgtagaccaggctggcctcgaactcagaaatccacctacttctgcctcccgagtgctgggattaaaggtgtacgccaccacgcccggcttatttttattttttgagacaaggtctccctacatagcccagacctggccttgaacttgtagcaaacctcttatgtcagtctcacaagtgctggctttgcaggtctggctcaccacagccagctatcgcagaagttttttttttttgttgttgttgttaggtttgtttttgtgttgttttgtttctttttaatgtattccttaatgctagccatggtagatgttagagcatgtaacagcatccttgacctgtatccactagttgccagcacatgacacgtgacaccaaaacaatcttctgccacattgccaaatgtcctgaggggagcagtggtgtttccctggcaggaaccacccatgaactctgctcaaaatgtgtttcatgaagcagaggctgaggagggtgctggactgcagggaagcaggggagaggtgtctagagacaggaacaggatcgtttctggcaggggacaaaggtcagcaaactctgagaactcctgggggtgtgagccacagtggactctactgatcctggggtgaggttggacccagccgctctccacatctgccatctgtgtgatgagggctttcagagctgagcataggctgatggcagggctgacagacccaaagtgatgcatgttggtgggggaagcagacaatggcaaagggaccagatttgactgattctgcgtcattagtgagcatccctctgcctagttctgcagaggagaaggccctcactgctgctcttccctctcccatgcttctcctgcagctgtgcacagtgcctcccaagttggtcagcagtgacacgtggaatgtctgtctcaggcccgtgctgttgtcttcagagacactgtcaaagtaaagcaaacagaaacagttggtgtgacactctgacaaggccgtagggccagagctccctctgggctcgtgagctaggtgtttgaactttgaacctagtctttgtcattaatggagccattgggaatatttatggagtgatgttgtggtcctgctctgtgatacatccaactggcttaaacccagtccctgtgttccaggagtccaggagctgatagggacaggggaagggagggaactcaagacagactcgaaggtctagctgttcaaaatgccgcccccccccttttaaaagggttatctattttatgtataggagtacactgtagctgtcttcagacacaccagaagagggcatcagatcccattacagatggttgtgagccaccatgtggttgctgggaattgagcacaagacctctggaagaacagttagtgctcttaactgctgagccatctctccagcccctaaaatgccccttttggtaagcccccagctcctccccagaaactggaaggctactttggtccattgactgcagtctggcttcctctctctgggtagttcctgtaggtggatttactctgcccagttgcccaggtcccaagagccctagggagagaggccatgcttagtccagggtctagagggcaaggggtcagctatggtgtaggagtcatgagttcacttgaacctcaggtcagtgatgactcaaaggaaatggagtggtccactgtgtagagtgcttgcccagcacaaatgaagcccagggttccaccccagcattgtataaaccgagtgtggtagagcacacttgtaattccagcactcaagaagccaagtggtggggaggtaaggatcaggaatttaagagtagccttggctgcatgaggctatcctgggctgcacgaggctagcttggattaggtgagtctcaatctcaaaaaacaaaacaaagtaggaaccaaagtcaagcaggagaggataggggccattaggaagagggcctgatggtggtggggctggaatctagctcactgtagcagttacataatacacagaagaaaggctctgggtttgattcccagcaccaaaatggggaggggtgagggatggggtgggccaatgggaaggggtgggcctttcagccatcgagctgatcctaggcttacagctcagctgtgtgctagattcccatctcttcatccacctgtgtactggctcccacctctgggtgtgtctgatgctactgcagaggggttccttctggcagggctggtggcgaagcacctacgcagtgtgcttgaaagactgaggccaggcagagagatagcactcccggctcccaaggctacggagttggtaccaacaggaagtgagtccttgggtacggaggctgtatgatcctcatgtaagaaggaagcctctaggatgatctcgggccgctctgcaggggaagcctacagtgaagagagagagagcatctaagagagattgcttctgtccaagtgcaacctgcccacctccctgcagtacaggttggctttgcagtatctggtaccactggtccctggaaagtgtccaccagggcaacgaggcatggccttctctcatgcgtgactcaccttaaccttgcagagtgacagagtgacagactgacagaggaagtttccatgctgaggtgggtcagacacatggtgtgggagctggggaataaaggaagtaggtggtcatctgtttgctcctctcttctgatgcagctgcccagcagcctggcttgcctgtggaggctttctctctcccacctggcacttcctccttgtgctgcagcctccggaacccccagctgctggggcagacagcaatgcatctcctcagcatgttctctttcccaggtgaagagcccgaagcatagactggtggatcaacagtccaactgctggtccctcaggaggtggcagtcagactctgggtttgccacttctcaggggtcctctccagagagcagtgagctcacacttccatcccagacatgaaatggaggctgtgaggggaggggccagcagctcaaacctctcaggccatgtgctgatgctgcagcctttctgaggcgagcttggcatttctctctatacttggacccctgggactgccctacagatagacttagctatagggaactggaggtcataggactctacagcagctcagccccagaacccacagtgggtgtgagtcatagagcatccactgagtaggagggagagccatatgcacgaatgtggagagacgccattgcatttgtcaggggagaagcgagttctagaaccttctgggtagcataataaaacatgatcttgaatctcgtgtgtgtgaatgtgtggatgaactcgtagcttacatgtgattgtgaaaagtctaaaaaggaaacctagccctttggcacatgcctgccatcccagcccttgccacacagagcaggaggatcaagagtcaaggccaacctcagatacacagtttgattgaaaccagcctagattacatgaagccttgttttattttgtttattttttaattatgtatatgaatgttttgccagcatgtatatatatcaccatgtgcatgcctggtggatgtcagaagagagcactggaccccttggaactggagttctagttgtaagccaccatggggttgctaggaattgaacctaggtcctctctgagagccattaaccaggagccatttctttagcctgagatggaacgaaacatctaaaaaagatggagtatggcccccacacctttaactctagcactcaggaggcaaaggcaaacggatctccttgagttccaggtgagccagagccacatgctgggaccctattggggatgagggtgggggctgaaaaggatgttatcaagctactaatgattttcagggagaaaataacttggggggagaccaatagacagacagacactttcatagagacgatcagaggataacttgcaactggttctctccttccaatatgtgggtcctggttatcagactcaggtcctcagcttggaagcaagtacccttacctgctgagccattgtgccagcttagctttggtttgcacaattcaaattttatggggctggggacttggcttagtggccctgatataattccccaccccacataaactgggtgtgttggtacatgccagtaatcccagcatgcaggtggcagaggcagagtttaaggtgatccttagctacatagtaagtttgagggtaacctgggctaactgtgactctgtcacacaaaaataaattacatatgtctgattattttaaaagacttatgtatgtatatgagcactgtatttgcatgtgtgtgtgcataacaagagtacatcagaaacagaagagggcatcaaattccactatagatggttgtgagctgccatgtatttgctaggaattgaactggggacctctggaggaacagccagtgctcttaaccactgagccatctctccagccctgtatgtctggtttttttattattattactaattaagatttatatatttttgttggtagattcttagtgtgttgtcctgactgacctagcactcaaagagattgatttgcctgcctctgcctctgcaccaccacacctggcccattacttttgtttgtttgtttgtttgtttgtttgtttgtttttcgagacagggtttctctgtgtagccctggctgtcctggaactcactctgtagaccaggctggccttgaactcagggatccacctgcttctgcctctcaagtgctggggttaaaggtgtgcgccaccaccgcccagcagccctttacttttataacagaaaaaaagagtctgggcaaggtggtaacatgccagttgtctgaggataccgctcaggaagcaaaaacagaggttcagggtcatctatatctacataatgagttcaaggccaggaccctgtgaaacaacaacaaaagactcagggaaagtatcagttgattaagcatagtccttacctttcacaaagtgagcctttttgtttgatttggtttttgagacagggtcatatgtagctaggttggcctcaaagtcactgtgtagcttagaggaatccttttctctctacctttgaaatctggaattcctggcacgtggcaccatgcctggctcaggtctcacctgggctcactgagccagctctgccccttcctacccccgaacattttgtagctgtaagattactgagcacaccctagagcctgtgaagctagcagaccctgaaccaatcaatcacctccagtcttctgaggtgttctgaccacttgcctccagatgnnnnnnnnnnnnnnnnnnnnaagccaagagacactgaaagggaactggggctccaggacaatgtgaggacagccagttatttagtttgattagtttctaccagtaggagccctagcaggttctgacctcaggcaccaggggatgaagcggcctgttgtttttccaggcaggcctgtgtgcttgggcccttggttagccttggtctgaaaacctatgggggcctgagctgggggacagaacgctatgaggctaggtccagaggatgatgatgatggtgatgatggtgatgatgatgatgatggtgatgatgatggtggtggtggtgatgatgatggtgatgatgatggtgatggtgatgatgatgatgatggtggtggtgatgatgatgatgatgatgatgactgatttacttatgtatgtgagcacgctgccactgtcttcacacacaccagaagtgagcaccagatcccattacagatggtcgtgagccaccacgtggttgctgggagttgaactcaggatctccagaagaacaatcagcgctcttaactgctgagccatctctccagcccctggagaaatgcttcttgtgaaggcccacactggcaccattctcacccaggggagcatggaaggaaggctgcaagagctgaagcaggccagcctcgggcagctggaattggatgggtggcatttgaatttcctgaggaagggtccagtttcaatgatggagcatgaggaactgttttgttgtgttttgttttagtttcttgttacgtttgtatttattatgttcgtctgtgtctgggaacatacactagtgttttcagggtcaaaggacagttttacagagtgggttctctttggtgtgagaattgaactcaggtaactcagcttgcagagcaagtaccttttccaatagaaccatcttgccagccctgcttttagctttgtaaggcagggtttcatgtagccctggctgccttcagactcaatgtgtggctccggatgaccttgagcttctggtcctcgtgcttctacccggtgggtgctagggtcactagggtcacaggtgtgcaccgctgtgcctggctcacacagtcctgggacggaacccagggcttcatgtttgctagacaagcactctaccagctgggctgcatgcacagctgcagggaagtctgtgtcctagtgagatagaatgcagtagggtatcctggggtcacggtgggatcaggctggcccatcacttgaacccttaaaccttcgaaggtcgtgtccttatgtttgtccttcttcatctttccaggtggaaagcagtgacacccccaaggacccagcagtgaccaccaagtctcagcccatggcccaggactctggcccctcagatctgctacccaatggagacttggagaagcggagtgaaccccaacctgaggaggggagcccagctgcagggcagaagggtggggccccagctgaaggagagggaactgagaccccaccagaagcctccagagctgtggagaatggctgctgtgtgaccaaggaaggccgtggagcctctgcaggagagggtgagtcccagcctcagggaaccctctttggctcctctgagtctatggcagatttcaggatgatgggcaaaagtgggccgggcagtggtgacggtctagaagctagacacagcacatgcatgtgtttacttggctcacctaatgtggttaacaggttttaaaaatttagctgccagtatttaaaaatcaagaaattccaaatgaaaatctggagttttggctctttgtgggggaaaaaaaaagctggctctggcaacaggcaacagtgggtttgtttgtgtaatgccaagggatgctagactgaggtaataggtgcctccccttctgcctatgctggttgtgtgcctcagtttccctccactgccagctggtccacttgacttttagacttgacctgccttggctcatgaggcccgcaggtgcagtgtttacctatcccagtgcagaggtcttgcctgacacactgcagtttggttgactccatagaaaacttggttgtgacagtggacactaaggggaggcaggaggaggaggccctctgcacacggccctgctcagacctctccatctgcggactttatagcccagccctggaattttggaaagttgcccacatttctctttcaggttaagccagagctttcagggccaagcaagctgtaaacatgtgagtaatgaggacagctagcttttcgtgtttgtaccgggcttcacagtttacacctcgcctcctcctccattatcacatttgatcctccggggcctgccaggttgctttgcatatgtgcattttaatttcaagaagtcttccttccaagtgtgtatgatgggatgagtaaattgattaattggcataacttattttgtacgaatccaaacctaatatttatgcagaggagggaacatttccagaaaagaggtttccaaacttattttgaaatctctttcattcattattcagcaaatatttaagctctctctgaggcactttgcatttgttgttctactttctgttccaaacgatcttgttcaagaggtttgattagccccctcttaaccaggaaaaaagtatagcttagaaagtgacttgtagccgggcgtgatggtgcacgcctttaatcccagcacgcgggaggcagaggcaggcggatttctgagttcgaggccagcctggtctacagagtgaattccaggacagtcagggctacagagaaaccctgtctcgaaaaaccaaaaaaaaaaaaaaaaaaagtgacttgtttctggcctccaaacctggcctctgactttcaatactttaactttttgttcttggaattttttttttttttttaagggtctcactgtgtagccctggctggcctggaactcactgtgtagaccaggtttcaagctcagatatttgcctgtctctgcttcctgagtgctgggactaaaggcatgcactatcaatgcctagcctagacctcgaacttctgatacttcttcctctacctccggagttctgggattgcacaagtaggcgccacgatgtatattttattatttatgtgcgtgtgtgtgcgtgtgtgtgtgtgtgtgtgtgtgtgtgtgtgtgtgtgtggcacttgagtatgccacagcatacatgaagcggccagagggcaacttgtattctgttctctccttccatcgtgtaaagccctgttcaaactcagattgtcaggtctggcagcaggtacctttatttcctgagccatcttgtctggccgtccctgtttttatatggttctcaggcttggacccagggtatcaaacccaggacttcatgtatgctgggcaaagcactgtaccaactgagctgcctttagaacccaggactggttaacctttactcttgagcctctcccctctgatctgatgctctgtatcgtatggatcttgaactgtccaggcctcataggagtgttgagagctcgtgaacagagagagaagaggaagcagaaaagagccttggaatgaggggaactatctcctcactgaagtcctcagctgagatgcagtcattgtcagctgactgctggaactgtggccagaccccatacgccaacacacaggacagagcctccaggaggccactgcccacctctcttggatgtctagggtcacccaggagtgagtctgacctgactccccaaggtcaaatggaagttgagactcggagtgtacctatcctgctcagactttgtctgagtccccaacccaggtcgtcacctcttcttgaacatttctttacctcttagacctctgctgtttggtggcctcccttcatctcttcagatctgtttcgctggcctaagaattgtcagagcaggaccacttcctccccacatccgaagcagcttccaacctctcaccccccctcccagaccttgcgaacccctgggaatctaggtggaaagtcatcacttccaatcacagcctgccaggtcagctgtgagacggcggccaggaaagcctagtttggccacctgccacccagtgcctgccacatccttcctcctggctctctccactgcagtctagtggcttctgtcaggtccctgatgctctgttctcacttcttcccccgccactgctcctgtgacaggcctcagcacatcccttgataatgaccagacagacagggccagcttcagttctcaagtcctggctgctgtggctctgtatctgtccccttgccccaggaacactgtccttcaagcacaacagcacatttggctctgctgtcactattttgtgttgttttggagagaggaggctggcctaaaacttgataagcggagtgtgaccttgaactcctaaatttccatcctgctcccaaatcctgagatttgagcaccatagcagttaccgcagtactgggcgtctaacccagggctacttgtctagtcctcatgacacatttgaaagcacacagtctctagccaactgtgaggtccttgaggacaagagccaggtttctgttcaggatggtttccacagaccagcacaaaacctggcacacaccaaacatgtctaacgaacacttgatggctgactgagtacctaagaacttggatgcagacaaggaagccctggagataaataaaccctcaaggtcaaagagcagccttagagctttggctccatcctgccaggtgggaggcactgtcctggtacctgccttgttgtgatcccagcaccctcgaggtgcattgaaggaacacagtatctggctaggaaaggcactgagctctctgaaatatgtgccactgtgagctgcaggcatcctggaaacccaggtgcctgcctctactgtacagtgtgctctaccccactgctcagggtcctctggccagctgtggtccatagtacctgggaagccaagacgcagaatctgtagctctccctcaaagatcctcatgctttctgagagccctcttctctcacttcagccttgggccatgtgaagacgacctgattttctctgcttttcttatggggaaaaaagtagggaaggcaggtgtggcacctcacacttgtagtctcagaacttgataggtggaggcacgagggtcagaagttcaggtcactcttgtcttatagctttggaggccagattaggatacataaaacctagtaacggaggagtgggctgagagtcagccaaggctgctctgctcagagtgagcgtgaggacaaacacgagccagtaaccatgcttagagtaaatctagcgcctgccctgtcacctggatattgtctcactgtaaagagaacttggagtagtctttactggatagtctctggccaacaggttaagtgcttgaagcccctgacctcctctgtccccaggacctgaggtaacttggagtcatgttcctgtcctccagagccactctggaaggcacaggcacctagcccagggaccctgagtctgagccaggagcatatgggagtaagagctctggtgttcagagacagacagtttgtggtctgctggccagactggagaggggaagagtgtttgcgtgagcgcgtgcgtgcatgtgactgacagtgagaaagctcatgtaggtatgcgcagtctttcagggaaaaaattccagaaagaagccagttggaaactttttcaagaagtctccatttggaagactccgggcctggatgactggcaaaggacacaagggataatggtggcagtgcaggtcagtcagaagccctgaaatccactcacggcctctgttgcctgttgtgaaatatttagcaaactcaaccatgtcttcttttcaggtaaaattttcttgtagtctaatgaataaatcaggccaaacagtggtggcccacacctttaatcccagcactcaggaggcagaggcaggtggactgctgaagtcaaggccagcctggtctacaaactgagttccaggacagccagggctacacagagaaaccctgtctcgaaaaaaacaaaaaataaaaataaaaaataatgaataaatcagtcctggtaaacgtagttaaaaaacactggggtaggaaggagtgatattcaggaaactcctaggtcccgtacatagtctaatagcctgggccagcttggattcctcactcactaccctcctctggctgctgcatggttgctgcagcagctgttgcagcctcagcaggagccgcgatccagggcaggcacccccttctggcagcctaggtcatgggctgagcaccgaggtccgagggaggggcttgccctagaggtgggaggcccagagcaggcctgagggggaaccccgtggaaagtggggagcagacttgtgggtgagaggacatggaggaaacggggaggaagagacgtggtggatgagatatgccttaaaaggccaaccacgtaccctgtactgggagggcgtacaccccccacccacacaagggttacagccaccacgctcctcccacacaccacctccacgaggcccagcgacacgcctgcctaccacggggttcacagcccacggggtaaccagcaggggctctgccctccccttctttctccctccctccctcccttcctcccttcagcccctctagatggagcccggcacacgtggcgatacagagcgttctgggcaggtgcagagagaaacctcaggtctgtctgttgacagtaggggaaagatccaagctaaagattcagagccataaatgctgtgggtggtttccacttctgagctaggagatgtaccaggggctgttttttttctgtttggggctctttgttttcgtacccacccacctccaaccccccaccccatgcacaccaagctacatgagccaaccttagcgaccttcctgctctgggcccaagccctgtattttctcagtctcaaagaaaagaattgaggcacctaggtgaagaaaggcggccgaattttccctacttaataggaaaagccatacagccagctgcctgccgcggagctgccgggagaggagccagagaagcgtgcagaaatggcaggaagatgtcactgccctcgtgtccggcctatgcgggcacaaagagtccttcctaaagatggcgctgtggagaccgctgctcccagcccagatgtccctcccaggaactgggatcagtgcccagtcccggaactttgagaaaagccaaagaaacagagaaacgtgtgcatcagggagttccttagggaagggaagcatgctgacaacgtacctactgtgcgccaagccctgttcatgcactcattgctcacaccagtccttagaacatgtcactttggatcagtgaggacacagcagaggttggggggggggtcatggtgaagaggggatccagacttagctgggtggcacatacctttaatcccagcacctgagagaggcagatctcagtgagtttgagaccagcctaggctacagagcaaattcctagacagccagggctacatggaacaaccctgtccccatcccccacccccaaaaatccttatcttaacctgagaaagagccaggaatggagggcagtttccatgttggtagcagggccataccatttagaactgtttgtaattggagctgtttcctggggtctattcccactggcccattgtctgtgccccaacaccttttcctaccccatgagaaaggagtaacagcctggttccttcagcccaacccctgctctgcccctccaccctcctgcccctgctctgcccctcctccctcctgcccctcgctctgagtgagggctggggtcaagcagcaggtgatggctacttcagagccccttttgtgtacttgagaccagggtccaaaggccagaagccatgcccctgagttctgtcttcttcctgtgttcttgggcccggaacctggaccagggtctctttgctccaggccttgcctggcacacgggtatggtctgtgtggacggcacatgaacaagcaaacactaggaggaccctgatcccatggaggcccccaggctcctctgagccacccccgtgactccgtcaacagtcctcttgttcttccctttccacaggcaaagaacagaagcagaccaacatcgaatccatgaaaatggaggcaagtgttttcctcacccacaggggccctgtgggtcctgattctagaagaaaaccacctctctgatggactgtggcgagtgtgtgtgaggggcccgagggtgggtcctgccccatctttggttgttccttgtgagagggagaggaagtgggggtggaggttggaagtcccctagtgaggcagccagctcatccccctccagaggtcaagcacttcccctctctgccttgttcatgagtccctgccaactcctaatccctcctcagagggtcagcccctctggccaggaaccagaatttctatactctgggatgagtgacccctctcagtttcccctccaggaggaatgaaccctgcagagtacctgtgcccaccttaatacctgcctgtctctctgtcctagggctcccggggccgactgcgaggtggcttgggctgggagtccagcctccgtcagcgacccatgccaagactcaccttccaggcaggggacccctactacatcagcaaacggaaacgggatgagtggctggcacgttggaaaagggaggtgagacgccttttatccttgatgccaagtgtggaactggcaaaccaaaagccagttccagccgccctctgggacttttgttgggctgtagctgagactgtttccccctacggttaactcctagtgcttccaggaactgctactaggcagtatgaagttcagttgtcctttatcttgttatgggtgctagctgtgcatgaggtagtatgtgcacacaggcaggctctgtgcttacgcgctctggcagctgtggatggagttgatgttctttctgatggctgaggacagaaccaaggggaatcggcggctcagtgggacctgcagtgcatgggcaaggcgggtctcttggaagaggtaacatttgcattgtgtaagtgtctagagaagtgtggacagtgaaagaaatgactcaggtgcaggtgacagccatggcgacaggcacttccactggattttggcgatgggatcaagggcatgttgatagaaaggtcagagaactgctacagccagtactgtaggtctggcctgggctgttgcctctgatgggaggactggctggtgggatggcgcgttcactgtgggatgccagggagctggaggctgggcttgggactgcagagaccacggtgtgagaaggcagggtctgtggggcctactcagtagagggcggagaggcagaggctcagaatttcatgcccagagatgccaacgatttggggcaacgagaaaggaagagcagcagccgtggggctgaggttcccaggagaggtgcgtgtgggcgagtggctttctcatacagtagccatgcatgcaggctggggccatgccccaaggtagtcaagcctgagagagctgaaagcagcccagagctgggaaagggaaaggggaagccacataaagatctaggcgtccattagtcccctaaggtcagctttgggaagggagggtggtgggtaccacgcccacagggagggaaggaagcagggttttgacctcagactatatgacagtatgtgcttgctggtcctggagaaagttccaagcaaggggagggaagggtcatggttctggctgctttattgtttccagttcctttgggatccaggaaggcagaaagcatgcttctgaaagtctggagaaagggcagctcggtcagggtctgagaggggcgcttttagcgctgagactgcacggtacagcttcagacagtgagctgctctttcttctctcgggaccttggggatcagagagggtctgcttcacaccagtctgtgtagtgcctctgctcttgaaccctgaggcagaggtgctgaggtaggtagacctgggcctggtctccttcaagcatcacgtggaggccacccagagccacaataagaaggatttctcccactcccagaaaatgaagttttttggtgttttgttttgttttgttttgttttgttttgttttgtttttcgagacacggtttctctgtgtagccctggctgtcctggaacccacactgtagacctggctggcctcaaactcagaaatccacctgcctctgcctcctaagtgctgggattaaaggcgtgcgccagcactgcctggcttgaaaatgaagattttttttaaaaaaatcaattttaggtttctgctaaaattttaaaagatttgagtggtcaagttggccccagccagtaaggacacttgtcactgagcctcacacaggagagagttctccacacacacacacacacacacacacacacactcacaggcagcacacatataaacaaaccaataaatgtaagtaacattttaaaattttaaattaaaaatatataagattggggatcttgggaaactggagaaggaaaatacatgtttgaagccacctgagtctgtgggacctcacatagttcaagcccctctcccactacatagccagaccccactcccaaaaaaaaatttttttttttggtttttcgagacagggtttctctgtgtagtcctggctgtcctggaactcactctgtagaccaggctggcctcgaactcagaaatccacctgcctctgcctcctgagtgctgggattaaaggagtgtgccaccatgcccagcaaaaataataatttaaaaaaataaactagcagcattggccagatgtggtggtgcatgtttttaaagatttatttattatgtattatatattatttattatgtattctgtttgcatgtctgcctgcaggccagaagagggcaccagattttactatagatgcttataaatcaccatgtgattctgggaattgaactcaggacctctggaagagcagccagtgctttcaacctctgtgccatctctccagcccttggtgctgcatgtttttaatcctagcactcaagaaggaaagtccagttgatttctttgagttcaaggtcaattttatctatctagggagttcaggccagccagggctacatagtgagaccctgtttcagaagaaaaaaataaggaatatttgctaatatacacaaaagtggaatgggagattttattgtataatctatgcatagatctaaccatatatatctatatgcatgtatctgtttcctgcttcagcaattattaaaagcatttctagtgagtctgctaggtttggggtttgcttacccgtcccaaccaacacaaaggcttctaggtgttaacagaaatgtggaaaaaattaactcagtttgaattgttagaggagcctatgacctggagtgtggagacctcaaaacacaatgtactctatatcagtgaaatgaactctgtgacttccagtgcaattagatctgtagaacttaaatgaggactatacactgtacatcccttgatccttgactggccacaagcccccagggcatatggatggggtggagctagtacttagagtttaggtttcctaacttcaaggagttgggctctaaatgccacaccctgctagggacagagaaggactaactaactgctggtgaaacacaggtagctttccagactccagagcagaaaccgatgctagcaggtcagttcctttgtcttgtcttgtcttgtctcgtctattcttgacttgtctcttctcttttctctttcttttttttaatgtgtctgactgttttgtctgcatatattgtatcacacatgtgtgttgtgcccacagaggtcagacgggaaggctgggtcccttggaattcgattcatggatagttatgcaccaccatgtgcatgctgggaactgaactgggtcttctatgagagccagtgcctgtaactgcggtgctagctttccagcccccaggcttttccaggcctgcttcccatctctaagactcactttggctctttaccctttgagcttcccttctgatgttgcttccctgggcctgctggtgccccggcagctcacacttcctgcatctctcagcagaacagtccatcccttaactgggatgtgctccagtcccctcttcttgatctacataacacatacctgcattttttgactttggggtttgtttgtttgtttgtttgtttttgttatttgctatgtaactgaggctcacctgaactcctggtcttctggcctctacctccaaagtcgtgtgcctttgcaacccaccttcatttccccagtgtacagatttactagaagctttcataggtctaactacctgccctccccactcctgactacaccccttgccttctccactccaccccccacacacttcatgcccctacagcacctgctccaggcacgaccaccagccaacacctcctaaccttggaatgaggcacccatgcaagctttaaaacttcttcagggacactctcgagccttctgccaggagctctgctagctcagtcacctacagagaacacagggctctgagcaggcttcagactagaggaggctagaggtggctttgggctcttagaagacgaactggggtttcagggaggagagaagggagcatttcagaaagagattgctttatttgtgaaatccccaggccttttctggatggaagtgtgaagctcaagtctaaagggcttgtatgccctgcgggaagcttccactagcatccgccctgcctctgcctcacctaggagacctttttcaccctaaagctgctttcccagggtgagggatgtagctcagagggagagcacttgcctagcaaggaagcccttggcttcagcctcagcactacatacaagtagcagctccttcccttcccagcccagttcccgcttcctccatacctgtcattcacattttagctattgggtaagagctacacttttcacctgtccatgattgtgaggtggcacatgcctttaattccagcattcaggaggtcaaggacagcgggtctctgagttcaaggccagccctggtctacatagtaagtgagacctgtctttaaaagtaaataagtgatgatttaaattgcacaaaatgaaataaaatagatgataaggaaaagtggccatttcctttatctctgactgggaattcttgctggagaagggaagctgttgtcttgggtctgctctgctataatatatgaccaaactctgttccaagacccacagcagctccctcatgccctgacccccacccgcctccagtcacgtatagagattctggctgtttcccaaggtttcaatcctgtgacctcccaaatcagcccagtgttaggactccatggtggatgggaggactcactcattaatcctttcacccagaccaggttctaagtcactttagggctggagtcccatattccagacaggctctaggatgtctgttatcttccctgactctagcttgaaggatggtccctggcttaagcatctctatacttatcagaaaatattgcatggtgatagtaacaatctgtggcctggccagagaatccctgactccctcctgcccttaagaccctgcctacacccaaggctgtccagcctggaataaaactatcacattcctgaggggagggtctttgttcctaacccttaggaggcactttgcccttcatcacttacccactctgggctctgagactaaagcaccaagctgaggcctgaagtggacagggaaagcaagagtcctaagtacagaagtgcgggttcatgaagaatgtgcagcctttcaagccccttgccaagtgggcatgaacaggagcctggttattgtctttaaagtccttcatgttattttgagataaggtttctctgtgtagaccaggctagctttaaactcagatatcttccagtttcttcctcccaagtgctcagatcaaacgtgtgtgctgtgctggcaggatggctcagtcagtaagagcactgactgcccttctgaaggtcatgagttcaaatccgagtggtcacatgctggatcacaactacccgtaatgagatctgatgctctctttgggtatgtctgaagtgtacttatgtgtaataataaataaatctttgggccagagcagtcatgcactgaacgaatggggttgagtagagcgagcagaggtcctaaaaattcaattcccagcaaccacatgaatgctcacaactgtatactcacatacataaaataaataagtctttaaaaaaaaaaaaaaggtgtgtgccatgtcaccaggcagattactagtgtgtgtgtgcctgtgaatgctagggagtgcatggagaggttgaggacaactttgtggagtctgtgtcttgtccccacaggtcccaggaccacatcaggactagctggcagatagctgttccagctgagctgtcttgctggcccctgtttttactagtttctgagacaggacttaacagtaaaacagtctaggctggtctccaacttttccagtcttcttacctacttccccagggccggggttttaggtatgagctaccaagtccagctgatatgatcagttttaaaagttactttacattatgtacgtattacacaaatacattcttattttaaaagtctcccccacacccaacccccacacaatttaatccagtatgcttcagagctggacacagtggtgcatgcctgagatcccagcactcaggaggcagaagcaggagaaagagcacaggttcaaagccagaatgggttgcctagtgagctccaggcgagcttgggctacagagtaagatacagtctcaaaagtggcacacacacgtagataatagaatccttttggaggctgttgctgtgtgctgtgtacaaggcacagttctctgtccgtctgcgggtctaagcctgcctcataggcatgtacgtctgtgactggaaccattctgcagtttcactttacagtttggcttttcacttacaataaggctggccagtttggccacataattcctagagtatttccactgtaggaattgccatgcttttatgtaaccaggctctgcctgctggccctttccgtcgtcgcagcatcttgctatccaggcatgttgtagcagtacacatccttggtgtgtgagggaggttgcaggtagcccaggctggtccaagcctggtatgtagttgaagatcatgttgagcctcagccctttcttcctttacttcctaggtggctgggttattagttgtatgcctcagaccgttttctgtggtgctacgaatcgaagcagggtctgcttgcatgctaggcttagcctgcttctttgtgcttttgtttttccataagacgtaaccctaggaagagaaatccaagtggaagaagtgtgtattttgcattttacaaattgctaggaaagagcaacaccgaagtccagcttccatgccagtcagcctgcattctgcaatcggagtgggggggacagggtgtcttgttaggattttaattgtcatttcccagatgataagtgaggcttggttatcttctcatgtttattgaccatttgtgctgctggtgctgcttctgggagttttaacaaatgtggtggtgtccatttgtttacaacctggggttgtaacagactgtttcctgtctgtctgtgagtgtccagagggccacctcttgctgggctatccaccatttaataagcaatcaccctgcaccccttgagcaggagctttgtgggagaggctatagaatatgagatggtaggtgtgatctcttccgctgtggagatcagtaaatttaacagcaaaggagtagccagtggtatggatgcttctgaccgagacatccctcactcttgccacagccaactcttgcccttgggcagtacctggccaccctggagaggacaggaacatttgcagctgagacaaagtaactttaccaaaagggtgagtgagttttaaaggggatcccatgaccaccgtaattagaaataacctcctgggttgccctgaaattgtcaaaaagaccaccactgtggattaactgcggatgggctagggcattttctgttgtttgggggcagttaatccagggtggccttgaaacttgactctaggaaccactgtgaactcttgatctcttaaacgctgggattacaggtgcaaaaggcccagctttggtgtggatgggtttgtctgttctgagaaagagtctcccactgtagcccagactgtcctagaacacactcgatagcccatgctcggctctaactcaaggtctgacgctgcacacttagttcattcacttctgggcacagaaagagcagctttgtgagcatcttccacttaagtgagggtggtaaccacacccagggcgcagctcctggctacagctaaggatgaacctggggaagggcttgcgcttcctccaccacagacctgaggcacatcctggcattgattatgtttggcttgatgcttggggcagacacctgccactgtgcctgataacctgagttttgtctctagaacacatgtaggtgaaaggagagaactagctcataagggctgccctctgccctccactgtgaccctgcatacacagacagacagaaagacagacagacagatgcacacacactcacacacgcaccccaaaaatgtggaaggtctctggtcaaaaccttgctatctcaggttacttctctgacccccctagcccggctttcctcaggtgcgtttgtcttcaaagctggtgcctggctcagcagatagaccctctagcttgctggccttctaggtcctgctgcctgggctgaccctcaaggccatcctgtgactcaggcctgcttccctgtgccctcaccctgcccttgtctggctgttctctcaggcctgcttgtctgaagttgtaaaattggattaggatgatgttggaatggaattctggaagcctggtttctagtcttagcttctgctccagatgagttgatcaattcagtttcctgatttgtagtgtgatagaaatagattgcctaattccaggaattccagacatttattatctgggggtgggaagggctggaatcgggatctaccactcgctccctctgtcacctacactacttgaaacatcagtgctaagttaagtatctgagcaagcctcagagctcacatctcctagaagtgtgtctgaagcatccttaggagaaggattatagaagaatctgtacattagttttgctttcccttctccatagctgtgctcctcccttctctattgttttagattctaaaggcccagagctgaatacggaggctcatgactacagtcccagtactcaggaggcagggggcagatggatctctgggtttgaggccaacctggtctatatagtgaatcccaggcgcatcaaggctacatagtcatagggagacactgtctcaaaagcagaaagatgcataaacaaagcccaccatggcatgttggcacatccggtggagagaggcgtggaagttaagagtgctggctgctcttgcagaagaccttttcgtccctgactcccacatgtgtgggttcacaagtgttttccagctccaagggctgtctctgccagccttagcctcttctggtctttatgggttcctgcatttacccacacagacacatgattaaaaataaaaataactaaaatcttaaaagaagtctagagggattggagagatgttcggcaggtaagagtcctggctgctccttccagaggacccaggttctagttctagcacccatctaagtgcagctcacaactctctgtaactcttgtcccaaggggtctggctggggcaccctgtctggcttccatggacactgcatgcatgtggtgcacagacacacagcaaaacacccagaagagacagagggctgggggttgtgggcagatggtagaatacttaccatcatgcaggaagccttggggtctatttctaacactgcacagactgaatattatggtgctcacttttaactccatccttaggagggaaaggcagaaggaccagaagttcaaggccagccagagctacacaatattgtattaaacccctgggcatggtgatgcccatttacctgcaatcccagtactcaggagacagaagcaaaagaagcactgcaagttctaggccagcctggtctaccctgagttctaggccagcctggtctaccctgagttctaggccagtctggtctaccctgagttctaggccagcctggtccaccctgagttctaggccagcctggtctaccctgagttctaggccagcctggtccaccctgagttctaggccagcctggtctaccctgagttctaggccagcctggtctaccttgagttctaggccaagtgagacttttaaaaaacaaaacaaaaacaaaacaaaaacaaaataagcaaccagaaaaacaaaacaaacaaaacatgattttttttgcccactaatcaggggaggtcccagtgatggctactgttggggagctcgagccctctctctagctccacaaagaactctgtgttttagtagagggagttaacaaacttaactcagtgttgactaatgatgcagcttattgtgctagtggcccgagacaaatgacacagactgtcccagagacacacactggcagaggaaggaggctgccaggctcagagcaaacctgtcttataggcagagctgatctgagcagtgtagagcagagaaaagaaccacaacttgggggaggggcaggggtcctggaagagactttcttggagaacatcaccattcagtagacaattcggaaaaggaaccaccatgggcagagaggacagggagggccgaagctgccggcatgttgaggtggcaagagatgtggtatacagggtttgggagagaattcgaggagaaagaagactcgagaggaagctgctggtcagaccatagggaccttcctgccgtggggagaaattcacctcagtgtgcagctgtgggcagagagaaccggccgcgttttaccatgatttaccatgatgtaagggggctccgaaaggggtgcaaggagcagaggaagtaaggggggcgctacgtttagcctttcctgagggtcaggtatggagggcagaactaccagcctgggctacagacagagtgatgcctgccacatcaaaatcagaacaggcaggctgttttctccagcccctgtcatataggccatgagtgacatggggaccaacagaaatcaacaatcagaaaaacagacctaaaaagcaagaccacgacagggagcggcttctgggagcaggtggccaaggtcagccagaggactgagaacatttctgcttctggttttgctcattttgaggagggtctgtttcatggtgtcagttcaggctggccttgaactcattctagagccgaggataacatctaactttctgtcttcctgccctggcctctaaagtgctggaattgcaggtatcagccgccaccactgggcctggggccccttctcccctgtcctgggctcctcctaacttcagtcacctggcctttcaggcttcacatcacagctgcaaggagtgcagttttatggtttgcagagccacagtgccctgcgttgccatagaattgccactcttcccggcctctgtcagcctgtgtctgtattccagctcagatgggctgaacaagaacaattcattcttctgtatgtttaaaaactgatgtgatttgcaaggaaatggtgtgtgtgggggggtggaaccaaagttcaggcagcaaacatttagttgaactcactttttacatcccaaggatgctgacagaagtcagtggtcagctaggtgtgctgtctgtcccactaggtgggaggatcacctgagcctggaagttgaggccagcttgggcaggagcagattctaaaaaaacaacagcaacaacatatcaatgttttaaagagtatgtgttgtcctacatcacttgggcaggcatccagagacctgtcctgagccatagaagccagtctctgcgcagcacctcagcaggctgggtatcagccctgaccctggaggctgggcttattaatgtttgagaaccactaggcctctggaatgaacagaactgaacctcgcctagagccccgaagactgcctcactttcagggaggtcaaccaggagctgtttgtttaatctgcctggggcagattaatcacactgggaattgaacgacagctcaggtcttcaggtaattggacagtgcctgctgctggggttgcgactctcactttctaagcctggttggggggggggggaggtggaaaggccggaaaggacccaggctttgatttaaatttcctcttccggatggagatggaggccaccccattgttttcggcaatagccaagccagcattctgggctcctcccatcttctttggaccctgaaacttgagagggtctgcatgcctgaatcagaatggtggtccctctgcctcttccgctgacccctggattctggagaaaggttgggggaggggtagaatactgtgttcctcttggcacactctccctactgggggtgattagcacctctctgcagactgaggtttctccagggtgataacatccacttgagcaaacttatcctcaggtactttctgctcttgtgttagcccctctagcttccttaatcccatcggtattggacagatggtttctctagacctattagactggttagagaagctaggtggtcacgtagaatcctgtcatcactgtctggtaagtgagccctgggtctgtgccgcatagccttccccacccccaaggtctcctcagtgtctcttgcccaggtccccagatataggcatcagaggaacaacagtgtaggcataggcaaaagggaggctggctgggggactggctccagagctgcagggaaatgggcagaagatggatggccatggtggcatgaggaagatgtagcaggaacccacaggcagcctggtggattggagcttccaagtatgggagagaacccaggagctcggtagggctggagagtgcttgggctagtcacacagggtgggtggagtcaaggagtcagcaagaaggaaggactggcttttaggcttttagtggatcctctaacttcttcattagatgctgctaatgggaattctcccaaggtcagcaggctcaggccactgcccgtctctaaggataaatgaatatggcttacctcatgcttctcacaccatctgcttgctaccaggaaaataatgccattgcaggtgagctgcagagctgcccaccctgccctaaaagcttggaggttacatctatccctactttgcatccctggaattctcctacctttgctggtcctggcagcctctgatttccctctgcacgtggaggaggcatcactagcacatcatttaccgtctaattgctgtcttgagtgagggctgtggtttatgtgtggtgggtcctgggcacacagttaggtgtgagtaacaggaacatggcagctcatctcttccaccttcttccccacccctcccccatgttcctcccccagcctggctaccgcaggtactcctgactcaactatcttggttgtacatgtgtttcagggagtctcacaattgggtccagaaaatggatctggttagtgggggttgggtgtgtgactttgggccaaatgctactttannnnnnnnnnnnnnnnnnnnnnnnnnnnnnnnnnnnnnnnnnnnnnnnnnnnnnnnnnnnnnnnnnnnnnnnnnnnnnnnnnnnnnnnnnnnnnnnnnccaaaccccacccccttcccctccatcccccacagggaacagcttgtccattgctttgatttgggggtgggggggaggaagctctggtcagcattgagatgtgggagtgcctctcttttctagaccactttctcagcagttggtgactctgaccctcctggtgggctcagtcctctcaaggactctgttactcacttgtaaccagcacacagcctgagctttctgaagtccccaaacttggctgatgttagaattacctacgctagtttaaaaagagccgcggtctccagccacgcctactgatccgcgtcggcagggcctgctcatcaggatttttaaatcttcctctggtaatttcttgttgttgttgttgttttgttttttgagacagggtttctctttgtagccctggctgtcctggaactcactgtgtagaccaggctagcctctgcctcccaagtgctgggattaaaggcgtacgccaccatgcccagccttccctctggtaatcttgatgggtttaaaccccagtgagtgtggacctcttctgacaaggacacctgtgagaggctaagggagaggaaaagatggactgcccaatgtggccttccttactgaccttcctgggctcccaggagcctctggagcccccagctgcttagcaggtgtttcctggtcccattggttaagccaagtcttgacccctacctcatcccttaggagaagcctggagggagagaatgaaagaaaaggggagatgttgccataacaactagctctaggcagaggcctcccttccaggggctggtactttaccccagacctggtggttgccatggagatgaggtactgagggacaggggaatatttaccccacttgaacagtagtcagaagctgccagaaggcagagcatctctaggtgggagtcccccagcccagcctttgctctcctggtgaatgtctgacactttctcttgcttggttgctctctctctgactgtttccttagcaacaagtcctgctaactccaggctgttggctctgaggctatttttagcttcactgccagcagctcagtcctggtcatttgcttgcagcctccatatgggttgcacaggaataggaaaacgaacatttcctggcagctttggagagccctaaaccaggacctcctggcaatcattagaatgtctgctatgggcaggatctgtctgcagatgaatgcagggatgcatgtagacaggaagctcctgaggcagtgttgcattcagctgcagtattcctccaccattgcagcaaggtgccctgtccacagtttccacaggaagacaggaaggaagattctgtgcctgccctctagggaggtgtaatctcatggagatgagtccagccctcttcctaagaggcaaaaccagctgtctgtgagattatacagtggagtggcagggagcaggaaaggagtaggagataaggaacagtggggagagatgggggaggggtctgagacgccgtatccagaactttctgcgataatggggttgctctgtattctgtgcatgcacccacaatggtggttcttcaacacatataacatggctgatacaactgaggaactacagcctaatacttacttaattttaattaacttaacttatatacactagctgctacttccatggacagcccagggttagaggaactttgttggtggagaaagctggtaagctaacataagttagccagggtttcagctggtggaacctgaaagagaagggccctgtgggagggaacagcaggtgggttcagagtgtggagctatgagtacatatcagggagacctctactttgtaggggccttgaatgtcatatggaatgttggctgcttcacactgaggcttctgtggactgaggggcaagttcagagcagatatccattcacactgacctcatagcctttgctatgtctctgggtctggtgtctgcaatgagtgcagataggcagaaggaagaaaagatgtagcgatttcccatgtgtggctgtacaggaaccataggtggtgcctgtcctgtgagtgacggcagcagtggcatcaatccctccttcacatgctacggatgctgaactcagaaccaaggtttgtcaagctggttgagtgaccatcacccctggcctccaggcagtgctgctctctgtttagcgatctggcctggaggctcgccttacctctgtgcagctggaaacccacgttttcacagcttttgtatggtgctttaatgtcccaggaaagaaagcaaggaccaggagaaaggaagcttcctggcttgtcacaggacacacacgcttgccccttggagcgtaaggcttgtcaacacgacacttcctggcagtttactggtatgagtatcactggaaaatgtaataagatggagtttgtctgaagaatacctgaaggccaggtgtagcagtacacacctgtaggaagatgagttcaaggctagccttggctatgtaatgagttagaagccagcatggcttgcaccctgcaagtgcagccaagctagagagcactaacttctttctgtgaggtctgaggtgttgactgagcctgtggagactgcggtgaacaagcctgttatagtcctagtctctgaaaggtcagggggcagcaagatgagccagttcagaactcccttccattctaggaagtgagagggtcctagggatcgaaccagggtttgagaaagtggtctacggtggagctacagcacagctccaagctcacggcttctcctcccagcttgggtagcctgactaagtggcttagacactaccactgtgatagagtcgaaaggcggggggcagtagagtttcctggggggcggggagcaggtccttttctcttttaggggacgtttgtactcctaaggttttcttattgctatttttgagccagcatctcaccctgtagcccagcctggcctcaaacttgaaatgacctactagaagtgatctcccaatctctctgcttcctgtgggagccatgggggctgggattacaaagtgcactatcagacctggccctgaacccatacagtttacataaagaacgccttttcagttgcccacctgctctgatggtctcagggtgagttggagagatccccttcctggttcatcccttcacctcgttatacccgcacctgttctagctggtgtgtgccagctcactggctgggagccaggcacctggggtgttacctcagtgcctttaggatattggttttcctagctctagagggctgatgtcatcacccctattttgcagatgagaaaacagacatcttggggttaagtggtctgtgtcaaggtcaccgcaatgggatcaggtcttccccaagcgttccagccagatagcggcggctccctgctggggcattctccttcagttctttgttctaattcatcttgcaaacttaatcctggctaatctttgtaaaatactcattcaccttgtttttccagaacatctgccatgttacagaatatctccattcagtgcttgaccccagtcccactactcagccatttagctttagtcaaaattgagagggtgggtggaagagttctttcttccttctacctgcttgccacctccaaatcgtggttatcttctgatctctactgtcctatctctcacccacacccttcatttgatgcagccttctgctatctgcttggtggtttgggtagttatccacacaggagtttgcttttcagtgattcccccttcccccaccccatctccccaagtctagtggaatctatcaacttcctgagagcaggaccaagtgtccatttctgtatccgatgatgctccagtcctctaatgggggggggggcggggcgccaggagtggcgtgtgtgcttcttcaaacccaactttattcctctactgtcttcagcagggacgtctgctctcagcctgcggtaaccgctgtctcggctgatctttctgttccctgagcatgccagatgacaattgagaccagtgacgagtgaggccttgaagctcctaaactgaagtgagtgtggcgacccaaatgagcagccgcggaactcagttgggccggaggctaacttgactctttgcaacactgaggactgcggggacgctcccaccgcccctaccaccttcccgcccccgttatcnnnnnnnnnnnnnnnnnnnnnnnnnnnnnnnnnnnnnnnnnnnnnnnnnnnnnnnnnnnnnnnnnnnnnnnnnnnnnnnnnnnnnnnnnnnnnnnnnnnnnnnnnnnnnnnnnnnnnnnnnnnnnnnnnnnnnnnnnnnnnnnnnnnnnnnnnnnnnnnnnnnnnnnnnnnnnnnnnnnnnnnnnnnnnnnnnnnnnnnnnnnnnnnnnnnnnnnnnnnnnnnnnnnnnnnnnnnnnnnnnnnnnnnnnnnnnnnnnnnnnnnnnnnnnnnnnnnnnnnnnnnnnnnnnnnnnnnnnnnnnnnnnnnnnnnnnnnnnnnnnnnnnnnnnnnnnnnnnnnnnnnnnnnnnnnnnnnnnnnnnnnnnnnnnnnnnnnnnnnnnnnnnnnnnnnnnnnnnnnnnnnnnnnnnnnnnnnnnnnnnnnnnnnnnnnnnnnnnnnnnnnnnnnnnnnnnnnnnnnnnnnnnnnnnnnnnnnnnnnnnnnnnnnnnnnnnnnnnnnnnnnnnnnnnnnnnnnnnnnnnnnnnnnnnnnnnnnnnnnnnnnnnnnnnnnnnnnnnnnnnnnnnnnnnnnnnnnnnnnnnnnnnnnnnnnnnnnnnnnnnnnnnnnnnnnnnnnnnnnnnnnnnnnnnnnnnnnnnnnnnnnnnnnnnnnnnnnnnnnnnnnnnnnnnnnnnnnnnnnnnnnnnnnnnnnnnnnnnnnnnnnnnnnnnnnnnnnnnnnnnnnnnnnnnnnnnnnnnnnnnnnnnnnnnnnnnnnnnnnnnnnnnnnnnnnnnnnnnnnnnnnnnnnnnnnnnnnnnnnnnnnnnnnnnnnnnnnnnnnnnnnnnnnnnnnnnnnnnnnnnnnnnnnnnnnnnnnnnnnnnnnnnnnnnnnnnnnnnnnnnnnntccccccccggcgcccccttcccccctccctttctggccccctccgcccccaaccccaaacgccccctgcccctccccccagacgggcagctatttacagagcttcgggccggggctcacacctgagctgtactgcagaggggctgcacctggccttatgggtaggtttctggacagagtcctggggataacgggggcggggaggtggtaggggcggtgggagcgtccccgcagtcctcagtgttgcaaagagtcaagttagcctccggcccaactgagttccgcggctgctcatttgggtcgccacactcacttcagtttaggagcttcaaggcctcactcgtcactggtctcaattgtcatctggcatgctcagggaacagaaagatcagccgagacagcggttaccgcaggctgagagcagacgtccctgctgaagacagtagaggactaaagttgggttcgaagcagcctgggctgtcctggtggtttgatgggtgcctggcagttcctgttgacctgtgtactttcttgggggaccatattgtcctcaaggctctaccagctctaggcctggagagagacagtttcctcccataatacaccccactattcctgttatcactaggtcagcagccagaaaagtgagctatggcagagagtagtgagaccctcagggtcacggagggtagcctggtgttttgtgacactgggatagcccaaaaccgcgtgggtttggcggcagaggcaatcagacctctgacctttggaatgggagtcgccgagagatagggtgagggttcagctgcctggagaggtggaactggacagagaagctgtagaccgtagagttagaagcggctttcttggggcggaggaactctaggccaagtggctttcttgagctatgggtattgggggatggatggtgttgtacccctcttggaccctgcccagttccagggcttagagaccaaatgctagcgtccctagttaacccttccctttcctattgtctgcttgaggagtgagtagaggtagtgaacatgggaaggagggtggttgtgctgccaggctgagtattctaatgagcccctcccccaccggccacgctgcccccctcttcccctttcctctagcctcctgctgctaactccctctactgtgctggtcctgctggaggcccctttcctcctttgccagcccaggctgtgctgggcacatgttctgtgctggtgggttggggatgctaaagcagctatcagcagcggcatctgacaaactggggaagttgtgggagaagaattttcacgaactgtggtgaagggtgaggaggaagacaaaggagccgtgggggaagaataagggaggtggcaggcacgactcccttggagacctggcagccggggaaggaacctttacctgccagctactccttgctctggaaatggtagcaggccctttcctctgcaagcttcctgcctcgtgctgactgaggagccccaacgaagggtttctatgtcattggaggcagctgcctaagttggatctggtgtggttgtcagaagttctgaaaagcatgatgggaggagaggggcaacatttgggcaggggtgtatctctgtgtgtaacttctgcagaccattccagaagaggaggtaggagaaaggaggactcagtcccaagccaagcttgatgcacctctttgggagaggcaatagctaattggtggaaggaaggggagagcgagccctggccaggtgagggtagggtctggggaaagctgagtgattgccctgcgttcttccctagccttgagccagcttccccagccctaccaatagcgagcacttaaaatgaccaccgttgggttgttgccctgaggcaaaaacatgaggcctggaggagggtggtgccagatttctcagcttaaaggtgacctgtgcgcagctttgcaggcctgccgagcctgcattgacagctccagccagcatccttggaattattgatacatatgtttcaggtcaagaaaagtgaccagacagacaccttcagtttagatgtttaggtcagaccaactcacacagagcctgggccagtctgcggcttttgcgccgtactttgactagttctagagctccagcccgactagcttctttaaagagagatttcaaagtagcccaggttggcctcccaattaaagttctgcctgtgctaagattacagaggtgtgcatgctacactcacctccaagttgttttctgatcactaaaaaaattattaaaagttacatttacttatttgaatgcactcgctgacccccatgccatgaatgtttagtctttaagagtgcgttagctttcataggtctgggttcttagagaaatgtatggagaaaatgaggtgggggcagggaactttggagcactcgtcggggtgtgcacaaggctccaggtccaaaggttgggcaggtgtgaagatgctcacctggagtcccagcaatctggagggaggcagagtgcggtccagaacagctgggctacaaagagaaaccctgtcaccaaagccacacaggtcacggctcctttccctgctctgtccccactggtatagtgaagataagtgcagagcctgagttttggaagacatgtgccctagatggagatgaactgtgtggtccccagagctgcacatataaagatccctgagcaggggtttgttttatttctgtttgtttgtttgtttaagtcaaggtctgccttatgtgactggccatgttggacctcactgcatagaccagacagaatccacctgcctctgcctcccaagtgctgggatgaagggggctgagtgattgccagagtgcctggcgctcacagtgctttgtctcagagtgtgagagagggaaaggaggggaccttttccgtgagagaataagcgaagcttggcttgttgtgggcagaacggcagagacagctcctgatccagtgtgctgagcaaataactgagcacatgacaggccttaggtcacactgtcggacacatgtgaccaacagcacagtgagtgagctcacagtggcgtctgcgtggggacaggccttaggtcacactgttggacacttgtgaccaacagcactgtgagctcactagctcacagtggcatctgcatggggacaggccttaggtgacactgttggagatgcactccaaatcatctagaaactctgtgggaaggatttgattgccaagaagaaactggggggaacccggaaaggctcactgtctcagctgggaagcaagacgggaagagttggagcccagatccttgcctgaactgtggtgcacaattaatatttgagaagccaaccctgtggtatatgcctgtaatcgtagaatttaagaagtagaggcaagtcgggcatggtggcacacgcctttaatcccagcactcaggaggcagaagcaggcagatttctgagttcgaggccagcctggtctacagagtgagttcaggacagctagggctacacagagaaacctgtctcgaaaaacaaacaaaacaaaaagtagaggcaggaggagcgagcgagcattcaggatcattctcagcgacatcgcaggtttgagaccagccttggctgtgtgagatttggcctcagaaggtcagagggtacatgctggaccaagagggaagtttcctcggaggcaggaaggagagctgagtaggtcttccagcttcagctgtttttatttacatgacgagctgcttgggttgcagatccactgagtagccttgctcactcctggaggggtcaagatgacttcctgtcctcatttctccaggctgagaagaaagccaaggtaattgcagtaatgaatgctgtggaagagaaccaggcctctggagagtctcagaaggtggaggaggccagccctcctgctgtgcagcagcccacggaccctgcttctccgactgtggccaccacccctgagccagtaggaggggatgctggggacaagaatgctaccaaagcagccgacgatgagcctgagtatgaggtgagccagttctcttcgcagcttgagcggggcgctcctgggcgctctggctgccggctcttactggctgcttccagagtatctgttcctggcttggctttgtcacctgatgttcacatggggctcatgccatccctcagatgcccagggctagggccgagctctggggggtttcggggtggccggcacttaggactgctgtgtattgacttttgctctttggggctccaggatggccggggctttggcattggagagctggtgtgggggaaacttcggggcttctcctggtggccaggccgaattgtgtcttggtggatgacaggccggagccgagcagctgaaggcactcgctgggtcatgtggttcggagatggcaagttctcagtggtgagttggacttggtggttaagaggtcggggaagagaagaaggggtcttggtcctgtgtgcctccctatatggggtcagtggaagaagccatagccaccatcactgagctgagcagaaagcctgctggccaggtggatgttttcccactcttgatctgggcccctcttgctactatttctggtttttgtcaatgcctctggtccccccaagcaagggtccagtgactcttattgtccctcatgcataaaagtcagaaggcacttggcttacctgtgtagagaacaactgggtatagtaatccctgctgaagctcaaggatcacgagttcaagaccaacctgagctacgtagtgagtgccaggccatgcaggactatagagtgagactgccccagggaaggaccgatctaagggtggcttggtccttaggtgtgtgtggagaagctcatgccgctgagctccttctgcagtgcattccaccaggccacctacaacaagcagcccatgtaccgcaaagccatctacgaagtcctccaggtgagcatggccccacagctacagggagtttcactggtggggctgccaggatccctggacgtcggagctgtgttagccaagcccgcagcccttcttcagcctccctcctgctggtctcctgcccactgcctacccacctttgcctctctgagttgggcttcttccttcttctaacttgtccctacttttgttccttctaggtggccagcagccgtgccgggaagctgtttccagcttgccatgacagtgatgaaagtgacagtggcaaggctgtggaagtgcagaacaagcagatgattgaatgggccctcggtggcttccagccctcgggtcctaagggcctggagccaccagaaggtaaatgtggtctggtccagtgcagcagggactgggaaagccacagttggagagccgcagagcccgcacagtagggtggaacagaaatggcgtgtgaggtctgttagcccaagggcgtgtgctaccatgtcatccactggctcatcagaatctcagaactggggggcaggaagccactggggcagtgtggcaccccactgtgggtgctatgctagtatcagtctgtaactgtggtcatctgctttcctggtgcagaagagaagaatccttacaaggaagtttacaccgacatgtgggtggagcctgaagcagctgcttacgccccacccccaccagccaagaaacccagaaagagcacaacagagaaacctaaggtcaaggagatcattgatgagcgcacaaggggtaggagcctggctctgcagaaagaacggggagctccaagggaggggtggacatcatctgggtgcccaggccgggccatctgggcaacctcctaatgcaggcttgcattctctgcagagcggctggtgtatgaggtgcgccagaagtgcagaaacatcgagggtaagtgttgctcctcacacaggcatagtgcatccagtggcattgggaaggctgtgggcccagggcctatctgcatacccctccatccgttggatgcttctagtcctttaggggttggaaacatcccagtgccatcagagaagggtagtccttgtggccttgactgaagttgaccttgcctctgtcatccttcattttctcaaaggtagtgtctgcctcccctggtccagtggccctgatctaactccagggccttgagatctagaagaattaggaaagaataggattggagggccgcctgagggacttggatcgaccgagaaccctgtccttaggaatggggttttgtcctcatgacaccctatacctgggtcgtgggataacttgaagatgaaggcttctgagatggggggccaactgctggagtgtttgtgaatgagtacccatgcatgtgtgggtgcgtgtgagtgtggggcataggtggtaccctcaggggtcctcctcagttgttctccatcttattttgtgagacagggtctcactgaacctgaagcttaggaatgttagctaagctgataggcagtgagctgtaagaagagttcactcacctgccttccctcctccccagccctgatattacaggcatatactgccatgcctgaggacctcctccgcctccattttggttttataagacagggtctctgtgtgtaaccttggctgtcctggaactcactctggagatcagattggcctcaaactcacagggatttgcctgcctgagactagacacatgggcaccaccacccagcaccttaccttaccttacctttccttacctttcctttcctttcctttcctttcctttcctttcctttcctttcctttcctttcctttcctttcctttccttttcttttctttttaaagatttatttatttattatacataagtacactgtagctatcttcagatgcaccagaagaggtcatcagatctcattacaagtggttgtgagccaccatgtggttgctgggatttgaacttcggaccttcggaagagcagtcgggtgctcttaaccactgagccatctcaccagccccacaccttttctttttaacattaaattttttatatgtatatacagtgtctcttgatcatacctacaacagtttctccctgtgacttccactgggcctaatgcaacatgtttctttcttaccttcatctgccaaccccccataacctgttgagtccagttggtacagcgtacctggctgttttatgtatgcagggatctgaacttgggcctgcatgcttgcttgagccagctctctccacagctctttgctggttctgctttgtcttggggcagagcattactgactcagctggccttgaactcactctctagtccaggctgatctttgatctttcaaatgctgagattatggaagggagttattagtgttggctgccgttctgacacccactttggtaggtcctgtttcagctgtgctctggtcccatgtgggcaggaactccagggaatagatgctcatggcatcctgttattttacagacatttgtatctcatgtgggagcctcaatgtcaccctggagcacccactcttcattggaggcatgtgccagaactgtaaggtagggaaacaacccacccaaagaggtgacccctcccctgcttcttggcattgggagccaacgcctgactggatgtggtgtgggccctcacgtgtacttacacctcaaagattgaggcttgttctggtttatgtcatgaaagatcctttcatacttgagtcttggcctcacgtgggcaggagtgggtggtagaggcaggtcaggcacactgacaatagaggggttgccgtgctcttgcccttgggagcccctgtagaaggctgcagacggaactcttggtgggcagttcccctcagccttcccattctccctagaactgcttcttggagtgtgcttaccagtatgacgacgatgggtaccagtcctattgcaccatctgctgtggggggcgtgaagtgctcatgtgtgggaacaacaactgctgcaggtgagacccctgcccacacagctgcatcgtgggtcctcgctgcctgctccacccacccgacatgctctggaccagtgctgctccagctggcacttctgcctgctgctagacctcagccaatgaggtcttagaggcagtcccctcttcaatgggctttcttccaggtgcttttgtgtcgagtgtgtggatctcttggtggggccaggagctgctcaggcagccattaaggaagacccctggaactgctacatgtgcgggcataagggcacctatgggctgctgcgaagacgggaagactggccttctcgactccagatgttctttgccaataaccatgaccaggaatttgtaagtgttgggtctaggctgtcatctcacgcctttctgagactagtccttcatgagagcccttgaataggcagtggggcctgggcaggttacaggagggactgaggcatgtgtgagctgtgaagccccacctagaagccctgtagttctcagcgggaggggccaacacagcatggggagctaggggcaacccagagcatggacctgatcaatggtgttcactacttaggaccccccaaaggtttacccacctgtgccagctgagaagaggaagcccatccgcgtgctgtctctctttgatgggattgctacaggtgagtggcatgggtcctgagagactggccggcttttcctcagacagtggagatagcaagtttatatagctgatgtaactgaatgactaagaactaagcatgagccaggcagcggtggcacatgcctttaatcccagcactgcactcaggagggagggcgggtagatatctcagtttgaggctagcatggtctacaatcctgtctccaaaaaaaaaaaaaaaaaagaaggaaagaaagaagcaagcatgctaacacatattctagtacttggacagaggtcagaagctcattcctcttaggctacagagctagttcgaagcctctctgggttatatctcaaaaatgaaacaataaatgaatgattattgcttgttagacctggatatggtgcaaacacctttaatcccagcacttgggagccagaggcaggcagatttctgagtctacagagtgagttccaggacagccagggctacacagggaaaccctgtctcaaaaaaacaaaaaaaagaaaagaaaaaaaaaaaaaaaaaaaaaaagccgggcagtgctggcgcactcctttaatcccagcacttgggaggcagaggcaggcagatttctgagttcgaggccagcctggtctacaaagtgagttccaggacagccagggctacacagagaaaccctgtctcaaaaaccaaaaaaagagaaaaagaaaaaggaaaaggaaaaaaagaaagaaaaggccacctctgtggacctgactcccctgcaggtttggttgactctcctgcaggtttggttggtctgtcctggctttggaaagacgtccacctgggcagagctgaggcacagtcatagcgcacatctgtgctgatctgacttgatttgggaaaggatactgggggcatcccaggtgatcccctgctgtgcatctggcaagacaagtcttaagagcaggtgtgaggttgatggctctgctgacagcgcttgctctctgctggctggcacagggctcctggtgctgaaggacctgggcatccaagtggaccgctacattgcctccgaggtgtgtgaggactccatcacggtgggcatggtgcggcaccagggaaagatcatgtacgtcggggacgtccgcagcgtcacacagaagcatgtatgtccctgcgcggggatgtctgttttcccccagtgtcctcggctcctggggacattgccatccactccttccattcagcccatttgttcgttccttcttgtcctctcctccggcctttctttctcatttttcatcttacttctgtggcatctcagggtgatgagcagattggaagtggggatttgagaggtgaagaaagaacatagagctcttgcctagagggcctgaggcttggtttagtcctcagcttgtgtgaatggggtgggggtagattgtagagcttgctgttcagtgctccacctgctccagtggttccagggctgtttgtggtaatgagttctcgattggagaaaggctcctgtcatctaagtgcttctggaaagttcttctgccagtctccatttcagggggttcaggtagtgctggcagtttcatctctgtaatcccaggggacaatcacatgacactacaattaactcccccaccccaccccagaaggctgcttggggatggggtgggggttggcacctcccagggttccatgttgggtctgtttgctcactgagatgataagcctagaggttctctaggcttatcttctgcctcttggactcatagatggttctttccctccgcctctgtccccggacagcaggcccatcacattacctttgtcctcccagatccaggagtggggcccattcgacctggtgattggaggcagtccctgcaatgacctctccattgtcaaccctgcccgcaagggactttatggtaaggtgccctcctctgctttctaaactggtaccttctgcacttaggtcttagggatctactttggacatttctgccctggcgactcctccagtggccctttcccttcaccctgcccatgcccgggcctcaccactcactgtccgatgcagacagcctcagctaatggcttcttctttcttccaacctctcagagggtactggccgcctcttctttgagttctaccgcctcctgcatgatgcgcggcccaaggagggagatgatcgccccttcttctggctctttgagaatgtggtggccatgggcgttagtgacaagagggacatctcgcgatttcttgaggtatagaccgagaccttggtttggccagctcactaatggcttctacctgggactgctgcttcgtccctgtcttgtctgcattgcggagctgggggattggagctggggactggtggcttctctttgcaagggacagcttgaggaagattttccatgtagagaggaagcagtgctaaagacccacctaggaagaaagttctcttgttcaaagaggtgtggtggtcatcatcaaacagatggactggggccagcccagtttttctgtggagaactccaaaatcagtttttaaaatcattctctgactagaatggcctgtgctcactctctggcacccttgtgggtgttttgtgatacctgagagaaaatcatggcttatctttttgctttcatttcttgttatgtgagccccagtttagcactgagccatgtacaagctcaatcataggggattgctgctgcccaaggcattcttttcttttcttttcttttcttttcttttcttttcttttcttttctttctctctctctctctttctttctttcttcctttctttctttctttttgatttatttattattatatataagtagctgacttcagacacaccagaagagggtgtcagatctcatgggtggttgtgagccaccatgtggttgctgggatttgaactcaggaccctcggaagagcagtcaatgcccttaactgctgagccatctctccagccctgcccaaggcattcttgtggtaggctgtcagcttatagtcctgtcagcctacgctcaataataacctcagattgtaaatgtgaggacttagtacacaaacaggcttgctccggtaaggtcttatgtggtcatcagccttgtggctattacaagaatgaacctcactttaagcacacaagagtcattcatggtactactggaataataacaaagttcagttggattgtgctggctgtccagaatgttctagccagccgggcgtggtggctcacgcctttaatcccagcacttgggaggcagaggcaggtggatttctgagttcgaagccacccggtctacaaagtgagttccaggacagccagggctatacagagaaaccctgtcttgaaaaataaaaattaaaaaaaaaaaaaaagaatgttctagccagcacatgtgggatggatttaagtttgggtcttcaggttattccggtgtttggcttcctacggaggaagttcctctggggagttaagactcttggccagcccagttgcccagcagtgtttaattaatacttcctccttggtcatcttgaaaccatctcctattttacagtctaaccccgtgatgattgacgccaaagaagtgtctgctgcacacagggcccgttacttctggggtaaccttcctggcatgaacaggttggtgagggttcctggcatggggggtatgggaggaggggctgcagagctgcaggcagagcagacagcccaaggagggagaccctgagtatccagccaggattgcctctgccgaggggctgctgctgtggcaggcttcttttgctttttaaaacactttctcaggaaagtggatactgcagagttagcctcttctgttttgcacacagtaggcatggacactgagctacaactcagcctggtgtctatatagtctggctatatggtgtctatatagtctaatctggcttcatacttggcgttctcactgcttctttccccttcgtgagtgttgggatgagatgatgcctctctctctctctctctctctctctctctctctgtctgtctctctctctctttcgtttttcgagacagtgtttctctgtgtattcctggctgtcctggaactcactttgtagaccaggctggcctcgaactcagaaatctgcctgcctctgcgtcccaagtgctgggattaaaggcgtgcgccagcaccgcctagctagactgggctatctcttaacctaggaaaggacaccgtcaaaagtgggcttcactttccctgcgctgtgctgaggtaacacaacaacacagaactttagcttttggagcaaaacttttgttttgcattgacctcaaatttcttttcttttttttttattttagatttatttatttattatatgtaagtacactgtagatgtcttcagacacaccagaagagggagtcagatctctttacaggtagttgtgagccaccatgtggttgctgggaattgaactcaggacctttgaaagagcagtcggtgctcttaacctctgggtgctgggctttcctgcagaaacaggagttttttggggtttgttgttgttttaataaagggtgtcttctttttttttttttttcttttttggttttttgagacacagtttctctgtgtagccctggctgtcctggaactcactttgtagaccaggctggccttgaactcagaaatccgcctgtctctgcctcccaagtgctgggattaaaggtgtgcgccaccacgcctggctttttttttttttttttttttttttttttgcatatgtactttttgtccctgggtagtcgttagctgcctggtatgtgtttttgaaacttcttttaaattttcctgtaaggattaaggcttgtttggttgtttgtgggcaggcatggtatggagagggttgtgctgtgtgtgtctatttggggtaagagcttttgaccctccctggaggcctgttggtacctagatagggctttcctgctctgtgcttctatggtgtctcttgctttctaggcctttggcatccactgtgaatgataagctggagctgcaagagtgtctggagcacggcagaatagccaaggtgagtctcagcactgaggacagcgtgagtggtggaggatgcaggctaaggagtgggcggcttagctgtgcgacatgtgacctcttgcgatggtgtggggtcatagagccagttggccagggaatgagcgtgctgcccctccgtcccgccccggcaggtgctgtagggtcttcaacaaggttctgggaagtgcagaggcttttgttcatacccgtgtacgggctttgcctgcctatttctgcaccacatctttgcttgctgaagaagccagaaaaggatgtcaaatcccagggcctaggactggagttaaagacagttgcaagcctccgtgtgggcactgggaattggaccagtgtgctcagtctctgagccggctctccagcctcagagctttttaagttgggtgtcccaggtctcgaattcccagctcagaccccatgagggttgtctggcctccccacgttctgacttctgtatcttcccctcttctttattttgaatgatgactaaaacctttgtgtacttactttttctgaaactttgggcttccttactctatctctaaagcctccctcctcagtcgtggctgcttgtctaccatgtgtctgatctacacgcttgcctcaacagcactacacttcgagtctctccttcccctccttcaggcagcagctgagatttacagttttccttttctgcagtttttctcttaaactaataaaatggttcttcaaaaagaaaaaacacttttgttcctgtttggctgggacctgcaagtctgcagcactgagagagtgctcttctgaaggagttggtcttaggctccacccacatagtctagctttctgcctgcagatcccagcagggggccttagctgctaagttattgacatccttctacctgaaagttgctccccctgaaagagtcccaggcttggaagacttgaggggcaagctagccacagctgctgcctctagtcctgttagcctgaatagaccaagaacacccaagtgccctcttagtgagaagggaagcaggggtcagtcagccatttcctcagcaaatgatggtgactcattcctctgcctcttcatcttctagttcagcaaagtgaggaccattaccaccaggtcaaactctataaagcagggcaaagaccagcatttccccgtcttcatgaacgagaaggaggacatcctgtggtgcactgaaatggaaaggtagagtgctgggtgcttgcgtctggccagggctgggttaaaaggaaggcggcaggctcctcatttcccccaaattccctgtgagtgaactttaacaagcgctttccagcatgccaggccctggggagaacctgcacttttctgtagctggttcctgttcagaagggtccggggaccgcccaacacagatgagcccactagaaccctcagcacagtgcatggcttggatcataggtattttgtgtgtgttttgaaagccagtatagatgcctgtgaggtgcaccagatggcacccagccgggtgggctcctccttggatttgaggaggatctagacagataaggctgttctcacagactccctgagctcaccaggtcagcccagagtcccactctttgagagcccctctcttctcagaggggcatttatggatgaatcagattgaattcagactcaagctgcctgcaccatccagttctcatgtgcagggcgcctgtagagcacatccaagaggcatttcaaaggtctgggggttttgctttgttttgtttttttttactgcctttgtttctggggagtgtgaatctcaaagctgggattatactacctatctttatacccacagagaggctggcacatggcagcctgtgacaggaattcagagtaaactaacatccgccatcacacccgcactcactcccttccctgccttcctcccacagggtgtttggcttccccgtccactacacagacgtctccaacatgagccgcttggcgaggcagagactgctgggccgatcgtggagcgtgccggtcatccgccacctcttcgctccgctgaaggaatattttgcttgtgtgtaagggacatgggggcaaactgaagtagtgatgataaaaaagttaaacaaacaaacaaacaaaaaacaaaacaaaacaataaaacaccaagaacgagaggacggagaaaagttcagcacccagaagagaaaaaggaatttaaagcaaaccacagaggaggaaaacgccggagggcttggccttgcaaaagggttggacatcatctcctgagttttcaatgttaaccttcagtcctatctaaaaagcaaaataggcccctccccttcttcccctccggtcctaggaggcgaactttttgttttctactctttttcagaggggttttctgtttgtttgggtttttgtttcttgctgtgactgaaacaagagagttattgcagcaaaatcagtaacaacaaaaagtagaaatgccttggagaggaaagggagagagggaaaattctataaaaacttaaaatattggtttttttttttttccttttctatatatctctttggttgtctctagcctgatcagataggagcacaaacaggaagagaatagagaccctcggaggcagagtctcctctcccaccccccgagcagtctcaacagcaccattcctggtcatgcaaaacagaacccaactagcagcagggcgctgagagaacaccacaccagacacttttctacagtatttcaggtgcctaccacacaggaaaccttgaagaaaaccagtttctagaagccgctgttacctcttgtttacagtttatatatatatgatagatatgagatatatatatataaaaggtactgttaactactgtacatcccgacttcataatggtgctttcaaaacagcgagatgagcaaagacatcagcttccgcctggccctctgtgcaaagggtttcagcccaggatggggagaggggagcagctggagggggttttaacaaactgaaggatgacccatatcaccccccacccctgccccatgcctagcttcacctgccaaaaaggggctcagctgaggtggtcggaccctggggaagctgagtgtggaatttatccagactcgcgtgcaataaccttagaatatgaatctaaaatgactgcctcagaaaaatggcttgagaaaacattgtccctgattttgaattcgtcagccacgttgaaggccccttgtgggatcagaaatattccagagtgagggaaagtgacccgccattaaccccacctggagcaaataaaaaaacatacaaaatgtactggtgctttctgtctaagttgccttttgtgtgttcttttataaggccccaccatcccctctgcacatggcagctccggtcctggaatgtgatgtttttggtcatctctaaagactgcagtttcatacttgggaggctgatgacacctttattataattattcttatggttctggctataattgttttaagattttctttcagaaaacaaaaacccaacacccttccctttaggtttcaaaccaaggtgcgggggggtggcaggtgcttttttaaggaccagtggctctggtgccctggctcccacccctcaggccaggtgagccactgggcaacaagctaggcagccagggagtttgaggcccaccctccgggccagtcactcttctcttcttcttcccttcctcgtgagtccggtgtgtcagggctggagggaggccggggcagcctccctccttgtgtgtgtggttggagtggcgtgtgtttcttttctagtgtttgctctgatggctgtgctctcacttgagtcagcttcacctgggccatgtgctcgcactttgttccgctccccagccagggcaggcagcctggcattggcagcgggaagggaaggtgtgcttggccccagggtgagggcttgcctggatggatggagtgtagatatgtggcatatagagatatatattttataatgggaggggggacggcacctcctgggaccagcagagactgggaggtgtgctgtcaagcacatggtcccaagaccgcatccctagaaagatggggcctatgataggccctatataaatacatagatagggtcatgtataagaaatatacacagagggggttggagggagtgggctctgtgttgagcctgggtccttcccgcagacagccccacaaacagtatatcagtctaacacatgcacaggaatctatttctgtctggatgcacaccagggagcccccagcacacttctctgcaggatcaggacgatggagtcggctacacagctctctctcgtacatctgttgccctgatgacaggtagactcgatcccagaagttgctaggtgctgaagtcaggaaaaggaggaggtttgatccaagcaggtgcttcctctagcaggtctgtgttgtattccctttgcctctggtgatgtcagcttctgttagcagcctgtggttactgacctgcaactctcggcaccagtcaagtcagccctcagcccctacctattctccccaaccaaagtcgaactgaaatctctcttggccatggggcttccattgggaaaataaaatgttaaaaaaaaaattaaaatgggacagtgaacctcacttttggagtaaagcaaatcagtaattagtgctaaaactagtcagaggctttggccccttgctcactgctcgggactaagcttggctggtggcttggtacactgcttgggctgtgtagtcctgcccacctctgctcattttctctggatagagttttaagatcgcagctagtttcccctgccatggcaggtatgactatggggctggagcatccaggagagggggatgcttgccctcttggagtccctgtactaaatgtaacgtcctcccttgctccagcagggctccattctgacctggagtccaccagcaccatgcaggaggactggaggggaggaaggctgctttaggcagtccaaggtgctccctccccctctagcaatggcaaggtcttcccagctcctgtcaggactgtcttcaaaggccatctctgcccaccgcatatgtgacgaagctagcctttcccaggagcctagtgccgcctcagctgggcctggtgctcccgtgcctggggttagtgtgagggctcaggaggaggagttcccaagggactgagtagaggcttccaggtggctgaccagtactgacctgacacggtccctgatggactcctcatggggcgggcatcgggtggccttctctagctttccttccagccccatctgtaggcttagtcttaccatagtgtgagggcaccaggcgagttagcccccaatatcttttggggaggggtgtctttgggactgtgccaatctggctattcatccgtctctaccccaagtgcggcttctagggtcacctctgaggagagctgctgggatgctggggtagctgaggggaggttgtggggagtttgcagtgcatctaggaactagctcactgcaggtggggctgaagctggattcagtcatgggaggttccctgtgggctttcctttccaaagactaggcttgttttccctagaaactaaggtgctggggactgggtgacagccacctctcagcaggtgccgtgtaagtgtgaagatttgtgaagatctgtggcccttgcccaggggaggtagctggtgctagcaccagggtcacagaactaaggcctcctgaggaggcacacataccagcggggtcccaagctggtgctaattcctctcataggacccagtaagcccgggagcctgcagtcggctgtttctctgctgtggaataccctgttagaaagctgaggtcccctaaagagcctcctggaccgagtcacttttgtggccgggctgagtatggcagcaggtagaaagatccgcaggcataaagatccctgtggcttttggcaaatgactgaagtgtggatgcaggagcaatgagtggaggccaacatcaacagcatctaccctccccaatagtgtctctgttctgggggtgctgtggtcctcacttgctggcttaggattggagttaggctgagccactttgaaggagtgtgtttacaggaagatacaaattgttggtttctctattctttactgtacagtgtgtccagagagtagaagaaaattcctgggcctgtctggttggtgcagagcttttatggcactacaaggtcttcaggaactgtcactgtaagagccctggctgtgagctggggctacgtgaccactgcagctgagtttccaagcaggcctgtgtttggatctgagtttgacgcttggcggctcccagggcttgggatgagtggcagtgctgacttgttcacttggcagagccaccctgtgaggaggtggacttagtggccctttccaattgatcctgtcccatccaggcagtatcagcactaggagcagtgctgggtcagaagtccgaaggaaaggactcggttgatcggggtcattgtgagcttgtgtatgtttgtgtagagaaagctgaactttgggaggaaaggccttgtccttgcaggcttccaagacaccgctaaggttagcctttggttggagacaagtctctagcccagacactggagtaggcgctgagaccaagaggcaggccaagatggagatctatggaaggccctttgctggtagggattcaaagcttctccaggggaccccagaactctattaactggctcccctaccgggacaagcttcgtttgtgggctcatagagtggccatagagtgggtttaacccagcaccaagcctgagggcatgagcagtggtctaaagtctcacatagtcccattttacagactaatttgattgcccggccgtagaattctacagaaacaacaatcactgaaattccttagaatacgcagagggaggaggtgactcaacacggtgctaaacacattttattaaaaatatatattgttaaattaagtctgctgtctggacaatgatgttctgttttgttttcttgtagtggagtttaaaagagactattattttactctgatatattattattaaaaaggcattttaactttgtacttgaaaactaagtgagcgatttcacgtgttttagctgagacatcgaagtagcgggtgcttacttgtgggaaatcatgtattcatactacaacataaactccgtagctgatttggtaataacttttactgttacagacgaattcgctttgaccccggtggcagagcgctttgactccacattccacgcagctaagtgcaggaccttccagaaccttccccggtcccccctggtcctctttcggttcctcttcctagctctctcttttcctaattcttttttttaagaattgtcgtttgtttttcctggtcccggcttccttctaccactgtattttttgttagggttgcttctctatttattgacagtaataatgtacatttcacagtctggttttgggacagccaggaggggtgtggggggctgcatacagcttgctgcactctccggtgtcctgttgtatctctgtgtacgtgatgcttgtgacatagctgttgaagaaatattaaaaggtcaatgcgtacagcaggtgtagagagtccgtcagttccgcttcatcactttttttttttttttttgtgcccagaagaatataataaagctcctttctaatgtacttgtgctggagaacacttgaataaatggactgtttttgtgcaaaaagaaaaacggaaaaaaaaaaaaaagcaccgtcataatgtccttttgtcctgcgactcctttcccctgatgtggccactcacagtcctccagtgggctgaagtgggtgcagtttacgttgggagggtctgggaaatggatttctaaagtatctctcatatgggtgttaactaggggttgggacccaagggcagagggagtttggttcaagatcaaaaacaggttagactaaggtgaagttgtctcgtttacttcccaaaccagcagattctcgagaccagagcaggcaacagactggcatcctggttagctggcagtaggaccagcagggacttatggatgccagagtccagaaggaagaagtcagcaaaggagagaggcagctggggctgggggaatcctggaagaaccttgcgtttaaaggagatatttgcaaacacttgacaggtgacccaagggctgggatcagtggccaatagggctactgctggtctgagcataggctgcctggcagggccttgcagcctgaggagttgtccaccgtgtctctgccatacctatctagaagggccgtctgtatgcggggtctgtctgtcctgcatatctccgggagtagccagcaggcttggctggggttccactcctaaggactgtccacccgtttcttccagcaaactttctggacggttggatagggagagaccgtgtggcggtccttgagcagactgggaaagtttggctaaacaggttttctcatgggcactttttcttgctttttctttgacaaggttgtaaatgtgtatttggcttttactctactttttttcttgatgtttttcaatgttgatgtggaatcttactttcaaatggctgcatggcattttcttgttgaatgtttgtttatatatattttattttcgctataaatagagcttcaataaacatctttatgttttggcttcccccttttttgtatttttttcccttgaaatagattcccagaaatgagaccagttggagaaagtcacagtggacagtttggtttcttcctgattccttcaaagagatcagcaggcaagcttcgggtttcagctcagagtttctgtctgggcccttagtgagcagttcccaccttgtctcagcctgttctctacagcatctcaagttccctggggcttcgttaacttagaaaggaagccacccacttagctcactgttctgaaagctgggtccagcatccagggcctcatgctgtcaggcacaggcacaagaaagaattcagacccacctcatacagaaccctgccctcaaaggccctcttctccaatctactgcagaggaatacagagaagacaagccacacagaacctgtagcacacatgttaatcccagtgggaaagtgtgcgtacctttaaattaggacacagcacattcatgtctggaactcagacagcattcccttgggtgtgataaagcaacttcacctgtctctacccatgagacttcagtctcttgctgtctccccaggccccccagtcctcagtgccagggttataggtgcacaaccacacctggcttttgatacaggtccttgggattgaactcaggtctttatacttaacacagcaagcaggcttttccactgagccgtctccccagcccaagggcgctgtttattttttgagaagctagacactaaggaaaagcaggggcgttttgcaagtcctctttgctggaagaatacagacagggatgatccagcctccgtcttccaagactgtccccaaggttcaggaaggatgggaagacatgaagaggtgggggagagattggtatagacactcttggttctgaaagccattcctaaatatttaagggccatccaagccagggttgggagagcttactcaagtcaaggagctgcctgccatttgattaataaaaacctattggttcttggtgtcacttggtaatatagggtttgggggagcaaagacggggtgggggtggagagagccagggctgacagagtcaaacaagagtttggtggaagcaagatagacagttgagtggcaacccccatagtgaggtggcatgtggtatatgcacacagtctgctacctgggctgtaccttcaggttctgtgaggctgacagataggacagaagaggtgaaacaaggggctgaccaagagggtggctaagtacacacagcagagctggcatgggctctggtataacctctgggtatgtgcatgttggacctggggctgcagtgaggtaagacaatggctgttatggacgagcacaagtcaccaggcatcacccacaatgatccattttgccttggcttcagggcgcaatgaaaggataaatcttacccctcagtggcctcttgactgggactctgacaggggactgctggcttgggaggaaggtcagcgtggggagctataggtgtaccaatcttggcccctctgttgccctatccctttcttagctccctcatttttgaccctggtctcccagcctcaggttcaacttgtagcccctatcggttccacactggctccttgccaggttccagtgacctctgcctgctcacagtggatcacagggtcagcctggttcagtaagctgtgacagaggtatatgtgagcatgcatgtggctcttgcaattcagacacctttcttttccaggggtagctgggtcttcttctcagaagggttggcttggtcccccaggaaaggccattgagaaccatccaacgtgggctctctggtgagctgtaacctgggcaacagtataccatagatagatagataggtaggtaggtagatagatagatagatagatagatagatagatagatagattagatagattagatagatagatagatagatagatagatagatagatagatagatagacagatagatagaacacacacacacaacccaaacaaacaaaacccaaccctaatccccaaggaaataaaccattgagacacagaggaagagagctgaaaatcaaatctctcaggcccactatctccctctatatgcaaccatgctcattaaaagacagtttcttagggcctgtgaaatgtctctgtgggtaaaggtacttgctgccaagcctggtggcactaggtcaccagaagtcacatggtgcaaatggagaataacttctgcaagggtcctctgacctccaaatgtcttcagtggcctgtgtgtatccatgtgtgcatgtacacacaaacacacgataaatgataaaaagttatatagaatcacactgaaaaagttatatagaatgtcagggtaacccagcctttcctgcacagactggctttcctcgcggccaccaaaagtacatgaatgggattgagaacatctgaaaggagtgagctaaggctgtagctgtgatatatcaacttttatgcagatgtttccagagaggtgcactggaggtggagacgtgaggacccatagttcaggccctgtgtagtttgagaccacactgggttacactggacccacactggtgagaccttgtcacaaaaatccccccccagaggacaaaacaacaataacaacagaaaccataaataccctttcctagtaaaagaaaaggcaaggctgggctggagagatggctcagcggataagagcactgactgctcttccagaggttctgagttcaattcccagaaaccacatagtggctcacaaccatctggaatgggatccgatgccttcttctggtgtgacagtgtactcacatacattaaataaataaatgttttaaaaaaagaaaagaaaaaaggcaaggctgagaagatcacacacacacacacacacacacacacacacacacaccattttaaaaggggaggaaactgctgttttctgcaggagcactggccaactttgtactattacttaaagcattcgccaggttagactacagccatggacggtccttctgcgctgcacaacaacttgatcagttaaccgttccggcctctaggcatccagcagggactctaagggctaagggcgcatgctcactccacatgtgttcctgggagcgtttgttttagggtaaatgcccggatgtcgagttgctgggcatagttttgggcctttgcgcattttagattctgcattttcagctgatgtcagggtaaccctgcctttcctgcacggactggctttcctcgcagccaccaaaagttccctgccagactcttagcatacacttctgtgtggaagaacactaaagacccacctgttcctacccacacagtgtcacgcctgaaatgtgagaggcagaatgacaggcagcccagagcacttggaggagctgtcacggttgtcaccctcttctggaatctcctgggacacgcctggtgagaatagagcctctggcttctcccttgcaaagtcacgtggcagggacaggcagggacctacagagcaaggcagtgctctgtgcccctgcagcgaaccgggagcacataagatgcacaggaaggtttgaatgagaggccctggggacaagccgggcttcctgctgttaaggttggctggctggtgatggagagtcttgagcctccgtggcctctgaggctgagctctgcaagtttagaggagaataagggaaggggaggggacggcacaatagcaccaacccaggaccagctggagaaaccacaccacgtggtcccacttggccttagtttacgttttcattttataatcattaaattttccatttcaactttatttaaaaaatattaatacctctgggtggtggtggtgcacgcctttaatcccagcacttgggaggcagaggcaggcggatttctgagttcgaggccagcctggtctacagagtgagttccaggacagccagggctacacagagaaacgctgtctcaaaaaaccaaaataaataaataaaaataataataccaatcttttagctactaacttatttttattaatttaatgcttaattttaatgttttatagtttgcttttgtttttgcttagtaagacaggatctctgagttgttatgtaatgcaaaataacctgaattgctgattctctgcctctgcttccttagcgagggatgcaggcctgaagtgcaccattctttacacagtgcccatagaaactagggctaagcactctacccaaggatccacagcctgtttacctcaccttccattactttatcacttgtgtaatttatttgtgtgtacactgggtatgcacacatgctctagagtggcacgtgggtaggaggaggtcagaggacagtttgacaacttgcaggagtcagttaactctttccattacatgggtcctggagactaaactcaggtcatcagatttaagacaagcaccgtctcctgatgagccttagcctcagacttcattttgaaaactggctgacctgctctgaactcacacaaagagtgtgccagggcgtcatgcccatccttgattaatctctagtagctcgaggtgtttgtttcttttgagacaggctctcattatataggccgggttgtcctaggagctcactatgtagactcagatctgcctgcctctgcctcctgagtgttggactcaactgactttgcttttataaaggcaaaagtctgtttgtgtgtgcgtgtgtgcatgctcacaagcatgtgcatgtgcttgtgagaaattgaaagcaaagaggcaggatctctgtctctgtctctgtctctctctgtgtgtctctgtctctgtctctctttgctaggctggaagacagcaagacccagcaatcctcttgtctctgagctagggttactgggttactggttactctctatctccatcgtgaactctagacccacccatctccatctcccaagtgtggagattatgtgctgctctacctggattctgggagatcttaaacaccgtagcagcaaccacaacacattctgctaacactgagagtggggctggaaaaggtgcttgtcaccacggctgacaacctgaatgcagtccctgaacccacatggttggagaaaactgactcctgggaggtggactctgccctctgtgtacatgccctggctgggaggtggcctctgccctctgcgtacatgccctggctgggaggtggcctctgctctctgtgtacatgccctggctcaggtgttgttccctttctcatatacagacactaggttgtttttagttttccagacagggtcttactgcatagccctggctgatcactatgtagaacatgctggcttagaattcctagcacaggccccatcccacctggttcaataaggaaaggcacgggacatggaggctcacagacatctggttttttgtttgtttgtttgttttggttttgttttgtttttgtttttcgagacagggtttctctgtgtagccctggctgtcctggaactcactctgtagaccaggctgacctcgaactcagaaatccgcctgcctttgcttcccaagtcctgggattaaaggcgtgcgtcacagacagaaaggcacgggacatgctggctcacagacatctgtaactttaatccttcttttggcctctttggggtgccaggcatgcatgcagtaaacttacatatgtaaggaatattaaatatgaatcttttctatcaactaccgtaacacttgtgtttaggactggaaatccaatctttttatctcccccaccttgtgtcttttcatgcaaatattttaccaataccagcagcaaaacccttgtttgcataaggggccactgctgcatttcaagaatctgatggccctggtagtggcccctccccccaccccttcctttcctgtgcctcaggattttaggattagccagccaataaaactgtagggtcagaccccagacaaagggggagactcagtcacctcctgagttagaatagaacgtgctcttcctgtctccgtgtctgcttttctgagcatcctggctgtcctggaactctcttagggcacagagctccatgtgcctctgcatccaagggttggaactaaaggcgtgcgctgccactcccgggtttaagcacatcctcttgatcaagagtaaactttgccctgtctagatactttgcttgaagtggtgatctctccgtgatcgtaacacatgtattatttctaacacacacatgcaggtgaaatactcagacacatgaaataaaaaaatctcttaggttggaaagatgtggggagctggagagactcagtggttaggaatacctgtttgttgttcttttaaaggacccgagttcaaatcccagtgcctgagctggccatcttacaagcacatgtaactccagctctaggggactcaataccttcttctaaccttcatgaacacacactcaaattcaagttaaaaaaaagaagaagaaaaaaaaagaagaagaagaaa

SEQ ID NO: 276 - DNA, 6157 bp, Mus musculus
cccacaggcagagccgcctgaagcccagcgctgaggctgcacttttccgagggcttgacatcagggtctatgtttaagtcttagctcttgcttacaaagaccacggcaattccttctctgaagccctcgcagccccacagcgccctcgcagccccagcctgccgcctactgcccagcaatgccctccagcggccccggggacaccagcagctcctctctggagcgggaggatgatcgaaaggaaggagaggaacaggaggagaaccgtggcaaggaagagcgccaggagcccagcgccacggcccggaaggtggggaggcctggccggaagcgcaagcacccaccggtggaaagcagtgacacccccaaggacccagcagtgaccaccaagtctcagcccatggcccaggactctggcccctcagatctgctacccaatggagacttggagaagcggagtgaaccccaacctgaggaggggagcccagctgcagggcagaagggtggggccccagctgaaggagagggaactgagaccccaccagaagcctccagagctgtggagaatggctgctgtgtgaccaaggaaggccgtggagcctctgcaggagagggcaaagaacagaagcagaccaacatcgaatccatgaaaatggaggcaagtgttttcctcacccacaggggccctggctcccggggccgactgcgaggtggcttgggctgggagtccagcctccgtcagcgacccatgccaagactcaccttccaggcaggggacccctactacatcagcaaacggaaacgggatgagtggctggcacgttggaaaagggaggctgagaagaaagccaaggtaattgcagtaatgaatgctgtggaagagaaccaggcctctggagagtctcagaaggtggaggaggccagccctcctgctgtgcagcagcccacggaccctgcttctccgactgtggccaccacccctgagccagtaggaggggatgctggggacaagaatgctaccaaagcagccgacgatgagcctgagtatgaggatggccggggctttggcattggagagctggtgtgggggaaacttcggggcttctcctggtggccaggccgaattgtgtcttggtggatgacaggccggagccgagcagctgaaggcactcgctgggtcatgtggttcggagatggcaagttctcagtggtgtgtgtggagaagctcatgccgctgagctccttctgcagtgcattccaccaggccacctacaacaagcagcccatgtaccgcaaagccatctacgaagtcctccaggtggccagcagccgtgccgggaagctgtttccagcttgccatgacagtgatgaaagtgacagtggcaaggctgtggaagtgcagaacaagcagatgattgaatgggccctcggtggcttccagccctcgggtcctaagggcctggagccaccagaagaagagaagaatccttacaaggaagtttacaccgacatgtgggtggagcctgaagcagctgcttacgccccacccccaccagccaagaaacccagaaagagcacaacagagaaacctaaggtcaaggagatcattgatgagcgcacaagggagcggctggtgtatgaggtgcgccagaagtgcagaaacatcgaggacatttgtatctcatgtgggagcctcaatgtcaccctggagcacccactcttcattggaggcatgtgccagaactgtaagaactgcttcttggagtgtgcttaccagtatgacgacgatgggtaccagtcctattgcaccatctgctgtggggggcgtgaagtgctcatgtgtgggaacaacaactgctgcaggtgcttttgtgtcgagtgtgtggatctcttggtggggccaggagctgctcaggcagccattaaggaagacccctggaactgctacatgtgcgggcataagggcacctatgggctgctgcgaagacgggaagactggccttctcgactccagatgttctttgccaataaccatgaccaggaatttgaccccccaaaggtttacccacctgtgccagctgagaagaggaagcccatccgcgtgctgtctctctttgatgggattgctacagggctcctggtgctgaaggacctgggcatccaagtggaccgctacattgcctccgaggtgtgtgaggactccatcacggtgggcatggtgcggcaccagggaaagatcatgtacgtcggggacgtccgcagcgtcacacagaagcatatccaggagtggggcccattcgacctggtgattggaggcagtccctgcaatgacctctccattgtcaaccctgcccgcaagggactttatgagggtactggccgcctcttctttgagttctaccgcctcctgcatgatgcgcggcccaaggagggagatgatcgccccttcttctggctctttgagaatgtggtggccatgggcgttagtgacaagagggacatctcgcgatttcttgagtctaaccccgtgatgattgacgccaaagaagtgtctgctgcacacagggcccgttacttctggggtaaccttcctggcatgaacaggcctttggcatccactgtgaatgataagctggagctgcaagagtgtctggagcacggcagaatagccaagttcagcaaagtgaggaccattaccaccaggtcaaactctataaagcagggcaaagaccagcatttccccgtcttcatgaacgagaaggaggacatcctgtggtgcactgaaatggaaagggtgtttggcttccccgtccactacacagacgtctccaacatgagccgcttggcgaggcagagactgctgggccgatcgtggagcgtgccggtcatccgccacctcttcgctccgctgaaggaatattttgcttgtgtgtaagggacatgggggcaaactgaagtagtgatgataaaaaagttaaacaaacaaacaaacaaaaaacaaaacaaaacaataaaacaccaagaacgagaggacggagaaaagttcagcacccagaagagaaaaaggaatttaaagcaaaccacagaggaggaaaacgccggagggcttggccttgcaaaagggttggacatcatctcctgagttttcaatgttaaccttcagtcctatctaaaaagcaaaataggcccctccccttcttcccctccggtcctaggaggcgaactttttgttttctactctttttcagaggggttttctgtttgtttgggtttttgtttcttgctgtgactgaaacaagagagttattgcagcaaaatcagtaacaacaaaaagtagaaatgccttggagaggaaagggagagagggaaaattctataaaaacttaaaatattggtttttttttttttccttttctatatatctctttggttgtctctagcctgatcagataggagcacaaacaggaagagaatagagaccctcggaggcagagtctcctctcccaccccccgagcagtctcaacagcaccattcctggtcatgcaaaacagaacccaactagcagcagggcgctgagagaacaccacaccagacacttttctacagtatttcaggtgcctaccacacaggaaaccttgaagaaaaccagtttctagaagccgctgttacctcttgtttacagtttatatatatatgatagatatgagatatatatatataaaaggtactgttaactactgtacatcccgacttcataatggtgctttcaaaacagcgagatgagcaaagacatcagcttccgcctggccctctgtgcaaagggtttcagcccaggatggggagaggggagcagctggagggggttttaacaaactgaaggatgacccatatcaccccccacccctgccccatgcctagcttcacctgccaaaaaggggctcagctgaggtggtcggaccctggggaagctgagtgtggaatttatccagactcgcgtgcaataaccttagaatatgaatctaaaatgactgcctcagaaaaatggcttgagaaaacattgtccctgattttgaattcgtcagccacgttgaaggccccttgtgggatcagaaatattccagagtgagggaaagtgacccgccattaaccccacctggagcaaataaaaaaacatacaaaatgtactggtgctttctgtctaagttgccttttgtgtgttcttttataaggccccaccatcccctctgcacatggcagctccggtcctggaatgtgatgtttttggtcatctctaaagactgcagtttcatacttgggaggctgatgacacctttattataattattcttatggttctggctataattgttttaagattttctttcagaaaacaaaaacccaacacccttccctttaggtttcaaaccaaggtgcgggggggtggcaggtgcttttttaaggaccagtggctctggtgccctggctcccacccctcaggccaggtgagccactgggcaacaagctaggcagccagggagtttgaggcccaccctccgggccagtcactcttctcttcttcttcccttcctcgtgagtccggtgtgtcagggctggagggaggccggggcagcctccctccttgtgtgtgtggttggagtggcgtgtgtttcttttctagtgtttgctctgatggctgtgctctcacttgagtcagcttcacctgggccatgtgctcgcactttgttccgctccccagccagggcaggcagcctggcattggcagcgggaagggaaggtgtgcttggccccagggtgagggcttgcctggatggatggagtgtagatatgtggcatatagagatatatattttataatgggaggggggacggcacctcctgggaccagcagagactgggaggtgtgctgtcaagcacatggtcccaagaccgcatccctagaaagatggggcctatgataggccctatataaatacatagatagggtcatgtataagaaatatacacagagggggttggagggagtgggctctgtgttgagcctgggtccttcccgcagacagccccacaaacagtatatcagtctaacacatgcacaggaatctatttctgtctggatgcacaccagggagcccccagcacacttctctgcaggatcaggacgatggagtcggctacacagctctctctcgtacatctgttgccctgatgacaggtagactcgatcccagaagttgctaggtgctgaagtcaggaaaaggaggaggtttgatccaagcaggtgcttcctctagcaggtctgtgttgtattccctttgcctctggtgatgtcagcttctgttagcagcctgtggttactgacctgcaactctcggcaccagtcaagtcagccctcagcccctacctattctccccaaccaaagtcgaactgaaatctctcttggccatggggcttccattgggaaaataaaatgttaaaaaaaaaattaaaatgggacagtgaacctcacttttggagtaaagcaaatcagtaattagtgctaaaactagtcagaggctttggccccttgctcactgctcgggactaagcttggctggtggcttggtacactgcttgggctgtgtagtcctgcccacctctgctcattttctctggatagagttttaagatcgcagctagtttcccctgccatggcaggtatgactatggggctggagcatccaggagagggggatgcttgccctcttggagtccctgtactaaatgtaacgtcctcccttgctccagcagggctccattctgacctggagtccaccagcaccatgcaggaggactggaggggaggaaggctgctttaggcagtccaaggtgctccctccccctctagcaatggcaaggtcttcccagctcctgtcaggactgtcttcaaaggccatctctgcccaccgcatatgtgacgaagctagcctttcccaggagcctagtgccgcctcagctgggcctggtgctcccgtgcctggggttagtgtgagggctcaggaggaggagttcccaagggactgagtagaggcttccaggtggctgaccagtactgacctgacacggtccctgatggactcctcatggggcgggcatcg

SEQ ID NO: 277 - protein, 929 aa, Mus musculus
SPRSPTAPSQPQPAAYCPAMPSSGPGDTSSSSLEREDDRKEGEEQEENRGKEERQEPSATARKVGRPGRKRKHPPVESSDTPKDPAVTTKSQPMAQDSGPSDLLPNGDLEKRSEPQPEEGSPAAGQKGGAPAEGEGTETPPEASRAVENGCCVTKEGRGASAGEGKEQKQTNIESMKMEASVFLTGPGSRGRLRGGLGWESSLRQRPMPRLTFQAGDPYYISKRKRDEWLARWKREAEKKAKVIAVMNAVEENQASGESQKVEEDPAVQQPTDPDTVATTPEPVGGDAGDKNATKAADDEPEYEDGRGFGIGELVWGKLRGFSWWPGRIVSWWMTGRSRAAEGTRWVMWFGDGKFSVVCVEKLMPLSSFCSAFHQATYNKQPMYRKAIYEVLQVASSRAGKLFPACHDSDESDSGKAVEVQNKQMIEWALGGFQPSGPKGLEPPEEEKNPYKEVYTDMWVEPEAAAYAPPPPAKKPRKSTTEKPKVKEIIDERTRERLVYEVRQKCRNIEDICISCGSLNVTLEHPLFIGGMCQNCKNCFLECAYQYDDDGYQSYCTICCGGREVLMCGNNNCCRCFCVECVDLLVGPGAAQAAIKEDPWNCYMCGHKGTYGLLRRREDWPSRLQMFFANNHDQEFDPPKVYPPVPAEKRKPIRVLSLFDGIATGLLVLKDLGIQVDRYIASEVCEDSITVGMVRHQGKIMYVGDVRSVTQKHIQEWGPFDLVIGGSPCNDLSIVNPARKGEGTGRLFFEFYRLLHDARPKEGDDRPFFWLFENVVAMGVSDKRDISRFLESNPVMIDAKEVSAAHRARYFWGNLPGMNRPLASTVNDKLELQECLEHGRIAKFSKVRTITTRSNSIKQGKDQHFPVFMNEKEDILWCTEMERVFGFPVHYTDVSNMSRLARQRLLGRSWSVPVIRHLFAPLKEYFACV

SEQ ID NO: 278 - DNA, 127722 bp, Homo sapiens
  misc_feature (1)...(127722): n = A,T,C or G
tttttgagacagggtctcactctgttgcccagactggagtgtagtggtgtgatcttggctcactgcaacatccgcctaccaggttcaagtgattctcctgcctcagcctccagagtacctgggattacagaaatgcgccaccatgcacagctaatttttatatttttagtagagatggggtttcaccatggtggccaggctggtctcgaactcctgacctcaggtgatccacccgtctcggcctcccaaagtgctgggattacaggcatgagccaccgcgcccagcctcaggatgttggttttcataaccacaggatagagacatcaaaatcaggaaagcaacattgatacattactactatctaatcctcagaccccattcagttttctccggttgttccaataatgtcctttatagcaaataaaatccagttcagaattgcacatttagttttcctatgtctttagtttccatcaatacgtaacggtttctcaacctttctttgactttcatgatcttgacactttcaaaaaatgcaagccagttaatttgtaaaacagctctcattttgggttcgtctggtgtctcctcaaggtcagattcaggcatgcacctttggcaggaacatcacagaaatgatgccgtgtccttctgactgcatcttggtaggtggtgcaccatttggatttgcccaattactgacaacattaacttttctttcaatcacttgattaaagtgatgtgttccagccttttccattgtaaagttactctttgtcgctttgtaattaataagtattttgtggggaagtactttgagaccatgtaaacatcccattcctcactaaacttgctgtttattatctagttatttctgtcagtgtggactatgggttataatctattaatatctgtcttagtccatttgcattgctagaaaggaatacctgagactgagtaatttataaagaaaagaagctgattttgctcacggttctgcaggctgtacaagaagcatgtggctaggcacggtggctcatgcctgtaatcccagcactttgggaggccgaggtgggtggatcaccggaggtcaggagttcaagaccagcctggccaacatggtgaaaccccgtctccactaaaaatacaaaaattagccaggcataatgacacatgcctataatcccagctactcaggaggctgaggtgggagaatcgcttgaacccaggaggttgaggttgcagtgagctgagatcgcaccactgcactccagcctgggcaacacagagagactccattaaaaaaaagaagaagaaggaagaagaagaagaaggaagaagaaagaagaagaagaatggcactggcatctgtttctggtgaggccctcaggaaacttccactcgtggcggaaggggaagaaaagcaggcatgtcacatgatgagacaggaaggaagacagagacgaggaagtgccaggctctctttaataatcagctctcaagcgaagtaacagagtaggaactcactcattaccttgaggggggcatcaagctgttcatgagggatctgtccccatgacccaagcacctcccactaggccctgcctccaacactggggatcagatctcaacatgagattgggaggggaaaaatagccaaactatctgaatatcattatttattttggtgctcaaattgtcccatattccaccagtggcagccccttttgggacaagggacaagtctgcttgtcccttgctcgacccaattctggaatctgctatttctccaggcaggtccagtgccttccagtaaagactggtatttagaaaccaagttctggacactagttttatttatggctattgaggttttattgtgtctaggtgctctcaggtgacagaacaagtgaatgtatatatttctgaggtgtctcctgggggaaggggttaagttagcatctagaagttgggggacattagtagaagttgctgtgagaaatccgataagagagtaaacatagttgaataaaatacggtgaacgggcacatataaaaccatacagagtgaactcgtatctaggattttctcagtgaatgaggataacggcattttatgggtttacaaagcactttagtatccacttgatttgatgttcgcaatgtctacggggcgcatgcgcaatgatctactcagcagctttgggtctttggggggctggctgcttgtccacagcattcccaggaagtgagctggctggcagctgcctgaggttgtaaggaagtgacattgcattccccaaacctagggattgcccaacctctgaaggaatccccaggaaaacatgatcaggccaagaggaagcttgtcctcctcaaaaacgacttcttcccctcagccctcaggagcagccacggaccacaatgaaccagggaaattctcccagggagtcaggccaggacctggctccactgccaagatgtgagccctggctgggtgtcatgtaggccacggacgggtagcccctgcatatctttcccttctagcttcttctaaagccagtcttcattgtggatcatctattttctctccaccactgtatgtatggtgctttggggtggttgagtttacaatttaaccacagggtacaggataagaagaagccacactgagaccccatggagaggcatgcacattactcagagatcttggtcttagagctggccacgacttggattatctttttcgcaaaaagagagtaaatgcatttttagttgtggatggggtgggttctttacatgagcaggagcatttttaacaatatattttctattgagatgaaattcatataatattaaattaaccactttaaattgtacaattccacggcatttagtgcattcacagtgctgtgcagtcagtcaccagctctgtcaagtgcaggagcacttttgaaagttcacccatgggcagggtgccggggctcacgcctgtaatcccagcactttgggaagccgaggcgggcagatcacaaggtcaaaagatcgagaacagcctggccaacatggtgaaaccccgtctctactaaaaatacaaaaattagctggttgtggctgcgggcgcctgtaatcccagctactcaggaggctgaggcaggagaatcgcctgaacttgggaggcggaggttgcagtgagccgagatcatgccactgcactctggcctggcgacagagtgagactccgtctcaaaaaaaaaaaaaagaaaaaagaaaaagagaaaaagaaagggcatccatggtggggaaaggtacgcaaggatgctgcgtggccattgggtggcgtgtggtgtgtttgcccagcacccttgctttggtgaacagctttgccctgcttcacagggtgctggcaggatctgttcatcccagtgccacctcttgaacccacttacaggagtgggcatgtaatctgtgctatcccactggccacagaacctggttcaggttggacttgtgaccaacgccagaacaactgaagtagtccctggaacttttctgctagggatggccccttgagagagggtgacattgaagaaaaacaaaaacagaaacaaaaaccagggcaattgtgtgtctgaggatcagggttgggagtgaggggttgttaaaagacccagagctttatgttgtggaggcattaggggatttcctgaagtcctccttcctttcttgaaggaaaagaaaatgatattcttccactgggattctaagctggaagcatgtgagcctgaggctgctggtcaccatcttccaaggctgtgtggagtttgtttaaagtaggagggaaagatgccaaaatagtgggaagcagtcgtgagcgatggaaacaggggaagaaagagagagagcagggagagagtgcactctggagctggcatttgaactaggttttcctagtcctaaatccccaactctgggcttcacaattgtctcaattctaaacaacagaatccctctgttcagactaattcaggctggcattctgttactgtaacagagagaatcttgactaatgtgacagccctacctggaaggcgggtagaaggatccccatgtgttacagatgaagaacctacggtgatgaggtccaggacatagttctcctcgtaggtgtcacatggaggggatattaagatgactgcagtggtgagtcactgtgggggtggaagtcgctgagcagctggtaggtgagccaggtctggaagtcaggagggaggatggaaggtcacccactgtgccaaaggcagatgggatggtttgagaagagcatggatggagaagacacgtctctgtcaggatgttgggggcaagggtagacctactgccacttttctcttttgagtcaggagtgtaggagctaagccttccgctggagaccctgggtagaggatgttagaggagcatgtgacctgtgagggggctgggagggcccctgtggtagtcactggtgctaactctatctagttctccccactttgaggcccatggtagcatttacttcctggtccttgtaagtgaatggagctgtgtgactgcctatagtgacaagtgccttttgtcaatgggacaccctctggtactctccttgagatagtggcttttctgtcgaccagggtccctgagtattcaatgagcagagccccctacctctacccctctgcaaacctgcgatagacatgtgacacgggcaagagaaggaactttcgcggttcgttggtaatctactgaagaaatgtaatgtacagttggactatgctctattttttttattgtggtaaaatagacataacatgaaatttatcattttaacctttttttttttgagacggagtctcactctgttgcccaggctggagtgcagtggcgcaatctcggctcactgcaagctccacctcctgggttcaagtgattctcctgcttcagcctccccagtagctgggactacaggcgcctgcctccatgcccagctaatttttgtatttttagtagagatggggtttcaccatgttggccaggatggtctccatctcttgaccttgtgatccacctgccttggcctcccaaagtgctgggattacaggtgtgagccaccgcgcccggccttttttttttttttttgaaatggagtttcactcttgttgcccaggctgccgtgcagtggcatgatctcggctcactaaaatgttcgcctcctgggttcaagcgattttcctgcctcagcctcctgagtagctaggattacaggggccttccaccacacctggctaatttttgtatttttagtagagacggggtttcaccaggttggccaggctggtcttgaactcctgacctcaggtgatccacctgactcagcctcccaaagtgctggaattaaaggtgtgagccatcacacccggaccttttaatctttttttttgagacagagtctcgctctgtcgcccaggctggagtgcagtggcatgatctcggctcactgcaacctctgcctcccaggttcaggcgattctcctgcctcagcctcccaagtagctgggactacaggcgcccgccaccacgcccggctttttttttgtatttttagtagagacggggtttcaccgtgttagccaggatggtctcgatctcctgacctcgtgatccatctgccttggcctcccaaagtgttaggattacaggagtgagccactgcgcccggcctaatcatttttaagtgtatagttcagtgtcataagtacaaccaccaccgccatccatctccagaactttttcatcttcccaaactgaaactctatccccgttaaataccaagtccccattccccctccccgcagcccctggcacccaccattccacttctgtctctatgagtctgactactccaggaccctcatatgagtggaatcctacagtatttatgcatttgtgtctgcctcatttcatttagcatagtatcctcaaggttcatgcatgttgttaacaggtgtcaggactccctcctttttaaggctggatcatcttctattgtgtggatagactgcattttgcttattcattcatcagctgataacatcaggttgcctccacttttggctattgtgaataatgctgctataaacattggtgtacagatatctactccaatctctgcttttggccgggcatggtggctcacgcctgtaatcccagcactttgggaggctgaggcaggtggatcacctgaggtcaggagttcaagaccagcctggccaccatggtgaaaccccgtctctactaaaaattaaaaaattagccaggcatggtggtgggcacctgtaatcccagctatttgggaggctgacacaggagaatcacttgaacccaggaggcacaggttgcagtgagccgagatcacgccactgcactctagcctggacaataagagggaaactccatctcaaaagcaaaacaaaagaaaacaacacaacaaaaaacaaacaaaaaaatttctgctttcaattattttgactgtacaccggaagtggaactgctgggttatatggtaattctatgtttaattttttttgaggtactaccatactgttttccatagaaactttgtggttttgagtcactgagatttggagttgtttgttactgcaggacaacctagcctgtcctgatactgccacataccctagataatctaggatcagccaggattctgatgaggccacagtgcggcagacacaagtgaggggtgtagaagccgagaggctaaaccaacctgagttaacccagtatgaggtgcagtgatgagggttagctagcacagatatgcctcctcttgggaccaaagacattaaggtcagggtctggaaccaaccctgtagccaaacggttgtttcttaacagacataaaccccctaacacagtcaccttggacctcttgaccccagcaacccatacatccaaggttacatactttaccatactaagtgactttggtggctcctaataatgtcatcataaatagccctattgaatagaaatttacatttgctcatcatggccctgagaatttcagcttttttttttttttttttttttgagacaaagtcttgctgtgttacccaggctggagtgcagtagcacgatatcagctcactgcaacttccgccacccaggttcaagcgattctcctgcctcagcctcccgagtaactgggtttacaagcatgcgccatgacacccagctaattttgtattttaagtagagacggggtttcaccatgttagccaggctggtcttgaactcctgacctcaagtgatcctcccgcctcggcctcccaaagtgctggggttacaggcgtgagccactgcacccactgaatttcagcttcttaagagcaactatgtttcaaaagtgtggtgtgggctgggcacgatggctcatgcctgtcatcccaacaccttgggagcctgagataggagcatcacctgagcccaggagttcaagaccagcctgatcaacatagagaggcccctatctctacaaataataataataaattagccaggcatggtggtgtgcatctatagtcccagatactcagaaggctgaggcaggaggattggttgagcccagaatgtcgaggctacagtgagccatgatcactccactgcactccagtctgggcaacagagcgagactgtgtctcaataaaagaaaaaaaaaaaagatgtgatgtggggtgatttcagagccggatgaacctggctttgaatcctgactctgccacttcccaactgtatggctttgactaagactgagcctcagtttcttcatctgtagcgtgaggagagtacaagccatatcacagggctagtgaagactagagaaaataccatgtctggtgcctggcacatagtagacactcagtaaacagtcgctgctgtttggggccgtgttatatgtaagcccttgatgaaggcagaggtatctcagtcatccttctataaacggtcttctcctttgccaagctgggtgcgccatttagagtgttcacggatgcccctcctgatgtagaaagcgaacagcccaggagggtcacatgttaattccaccaaggtttactgagaatctcctagcaccaagtgctgggctacagggatgacagacgcggcccctgtcctcacagagcactgggagtctctgggccggtggggaccatggacagcagggcctatcatcagtagggcggggtggccacttgagtgagggtgacactgaaaacggccagaactatggcctagaagctggtctcagatatcgaggctcagggtgggggttggggagacggagggacctggaagcattggagaacctcccgaaggaaaaccttcccgtctgtatgaaaggtcagctcccggtcccagagaacttggcaactcggttctgtgacgctaaaagggtggcgttgggggggcgggtgctgggctgcatggggagaagggaaaagtaggatccgcttcactgtgaagtgagtcccaccaccaactccagcaatccctgcccacaagtaggatggcgggtccctgggaagggagcacgccatgtcctgtgccagtcagggagctcagggcactgtgatatagctgaagtgctgagtagaattcggggtgcagagctgcgggtggctggtggggtgctggggcgcgcaaggaggctggaggcgggggtgggggggtgcccagccccaagtcctacagcggctgctggaggagtgagatgagcacacagtgagtggctgtgctggtggaattagacagaggtgccccaagtcaggaacctagagccctgagcgctccatggggaaggagaacagcccccacggtgaaggggtgagggcggtgtgtaggcacacacagaatcttccagctggaagagaccttcaatgtcatttcattcaacctcccacctcatgaaatctttcagtcttccagtgcccaactgaggacacccaactctacttggacacctcaaggtacggggaactcactcccttcaaggcagctcatctcagagaggctttggagcctgcgggacggccaggaggagcctggcgctccgaccttggccctgtagagcagagtggcctctactccgcggcggcacctggctgggggttgcggcgcggttgggccagcgctgctgtccccagccccagtgctgaggcaggcagagcgcagtgggctctggcggaggtcgggagaactgcagggcgaaggccgccgggggctccgcgggctgcggggggaggcacttgacaccggcccggggagaggaggggccgctgtccctgcggccagtgctggatgcggggacccagcgcagaagcagcgccaggtagcggggcgcccagcgtggggagggctgcggcgaggcccggagctcggctacgactcgaggggctactgtagtggccgggagcgcggccgaggcggggcgcccggggcccggcccccggtctgggcggtgcggggtccagacctccgccaagcggcgtgcggggaccccggcggggccgcagaggccgggaagtcgcgccgagggcgctaggaccggccgcgcgcccaggccgctcccgccgcggcgccccggggccccccagtcggcgctgcctcccgggccggctccgcagcgccggggccggggccagcgcggccgcggggggcgagcggcgggcggaggcctgggcccgcgggcggccggagggagggaaggaggaaggcggagagaaggggtgggagggggggacccggcggaggaggcggagagagggagcgcgacagcgagcggagggagggagcgagcgagcgaggcaggcaggcgggccgggagggagggagggcgcgcgggcggcggcggcggcgagagcagaggacgagccgggacgcggcgccgcggcaccagggcgcgcagccgggccggcccgaccccaccggccatacggtaatgagcgccgctgctggcggcccggaaggccggcccggaggcggcggggagccggggagccgggcgaggggcgccgcggctggcagtgcccggttcggggcacgctcccggacccctgaaactcggctcctggcgccnnnnnnnnnnnnnnnnnnnnnnnnnnnnnnnnnnnnnnnnnnnnnnnnnnnnnnnnnnnnnnnnnnnnnnnnnnnnnnnnnnnnnnnnnnnnnnnnnnnnnnnnnnnnnnnnnnnnnnnnnnnnnnnnnnnnnnnnnnnnnnnnnnnnnnnnnnnnnnnnnnnnnnnnnnnnnnnnnnnnnnnnnnnnnnnnnnnnnnnnnnnnnnnnnnnnnnnnnnnnnnnnnnnnnnnnnnnnnnnnnnnnnnnnnnnnnnnnnnnnnnnnnnnnnnnnnnnnnnnnnnnnnnnnnnnnnnnnnnnnnnnnnnnnnnnnnnnnnnnnnnnnnnnnnnnnnnnnnnnnnnnnnnnnnnnnnnnnnnnnnnnnnnnnnnnnnnnnnnnnnnnnnnnnnnnnnnnnnnnnnnnnnnnnnnnnnnnnnnnnnnnnnnnnnnnnnnnnnnnnnnnnnnnnnnnnnnnnnnnnnnnnnnnnnnnnnnnnnnnnnnnnnnnnnnnnnnnnnnnnnnnnnnnnnnnnnnnnnnnnnnnnnnnnnnnnnnnnnnnnnnnnnnnnnnnnnnnnnnnnnnnnnnnnnnnnnnnnnnnnnnnnnnnnnnnnnnnnnnnnnnnnnnnnnnnnnnnnnnnnnnnnnnnnnnnnnnnnnnnnnnnnnnnnnnnnnnnnnnnnnnnnnnnnnnnnnnnnnnnnnnnnnnnnnnnnnnnnnnnnnnnnnnnnnnnnnnnnnnnnnnnnnnnnnnnnnnnnnncgcccgccttgggggcacaccttcccccggagtgcccgcggcacggagaggggtggtcgtgcccggctcctccctgtccccaccgcgggccgtgggtgcccgggcggccgcggtggcggcgccgcaatgtgggggcggggcgggggcgggcgaggatcccgggcccgggcccgggccgcgggggccggaaaacgcgggggtggaagtagcggggccgggaccgggagcggcgcagggggggtacgcccggggtcgcccctccagcacccccgcgcacactcccacgcacgcggacacactcacgcacacgcaccccgccgggccggtgcagacgtgtccttgaaagcttcgcatctgcacagtgaaggacgaggcctcgccgcggctgcggagcggggtcttcggccccacgtccccgcaccccgggagacctcgagcttcggagccgcaggcggcggctgtccgtgtcccgccctcacccccagttcccctcccccaggccgccctgccttccctccccttcggcgcggaccgggctggcgcgggtccagggcccgcccctggcctcccccagcccctcatcgctggggcccgcggccctggggctgccaaactgcttttcgctttcctgaagcctcccttcttgggggcaccctctcccaccccagcgcccctctgccatttctccccctctcctcatcccctccgtcctggcaccctctctccgctgcacggccagttgaggaggtgttggcgccctgggcggggagcagtgccctctggttcccaggggctgcctcccccggctcctgaggggagccccctgcggctgcaccttgacccaacatggcgtctggcacccagcagggcagctctggcctgcggcaggcgggagggtgggcagggccgagccccagggccgcgcagctaccccccctccaaaccagcggggacagaagccttggggagaagcgctgtccgccctgtgacccaacttgcccctcactgccgtgcccagagactgccatcagcatccctgagggcctgctcagtcttcatgtttcaccctaggctgccagcggctgaaccgcctcctgggcgggcggctacgaagggatcctgggatcaggtgctgctccagtgtcgcctcctccctcgcgggcagatgtgacagctgcagccaggggagctattcgccttgctattgcctgggtgttaggactggcctgtgggatttggggggccaggcatcccggggaccctctttggttggctagcaggggccatctccaggtagttttctgagctgcctgcctttggagagttgggttgtagggagttcctgctgggtttctggggcaaaatggtccccctctgcctccaggttctaccgaggccctgcttgggctgtgacaggtggctctgtcaaggtgggagtctgtgtgtgcacatgtgctggctccaggcgagggaccaggctggcctgtgcagcagctctggcacctgcctgcctccctggtgggtccccctcctctgtgcagctcctccccagataagcagctgcggattcaggccgaccaaacttccctcgttaccccacccaggcaccagtgccttccataggagactgaccctaagaaaggtgaattccttctagactcaaggagtggactggtccacagggctgccctctgagtccttcctggagaagcctaggaaaggacgccagcagccatctgtcagggtgtctgcggacaggattcctctgtggggtgggggttggactagagccggaaggtccattccagctttgacattctatggctctgattctagtggtggaatttcaggcctagcaatggggacagggtggtctgtttttcggcacatggcagtaataggggaaggcttccaaggagaaggagatatgagagagatcagggcgcccagcgagttgggccttgggaaggagaggcagtgtgaggagggtccctgcaagagacgggttggtcacgtccgactctgcagagggtgtaaaaagtacagcctcctttaagcctcggcacgtgtgtatcctgtaggtttgtgtataaatccctgtgtgtggataatttctgaggtttccttttcaagtccaattcacagtaagctcctcagtcccttatggatgttttactatcgctttcacacccacctctgccagtggttctcaaaaagctaggaagacaggacaaacggtaaaatccttgtccagggtcaccggcaggaagaagtggagccaggcctgcactcgggggaagatgccccatgctatacctcttacctgggctgctgcatgtgtctgtccccgctctcagtttgtgatctccaggaaacaggggccttgcctccctgggtccccattggacaagcggtgaggcctccgagggtgtctgctgagcgaggggagcgcactgccctccagtcctctccccgaggcagcgaggcaggttagtgctgggctcccttccccctgctgctgtgcgccgctgcccagcggccactgcctacttacaggccagctcctcagggtcacacctccctgaaagacccaagttctttcccagcaagagccagactcccccaaggcttctctttttgggatccaggtagaaagaggactctaatgggtgagttaaaacagaccaccctctccccatctttgggcccgaaatgtcagcattagaacccaaaccttagaattgcagtctgaaagaggagtttaagctctgagagctcttagtgctgggtacgggactgtttgtgggaggtggtgcccagttcttcccagggttgtccatgctacccagagcctgaggcctggagggccattcacgtgccagtcacatgcctctccctgggtacttcctgctgcctccaacttgctggcctggggtcctggacttggtgctcgtatcctccccaccccgtgccccactgggagttgagtgtgtctctggcctccagcaggtagggccagagcatctaccccaatgccattccccatgctgcggccctcggggaatagcttctacttttgtttgaatattagtatgtgagcagagagcccgtcagaagcccacctggcctgaggctgggtttctgcagggactttgctgttcctgagcagggctttaatggtctactaaaggtgccagatccctttccactttaattttgagggctcattttcaatcatttctctctgacgatttttccctaagaacatgaccaaatctgagatccatgaagtgtcagcctgagatttatgtctgtatccgagcctgcctccacttggctaagtgtgtgggcaagacgaggttcagtgcacatgtgtctgtgcatgatgtgtgtgtacgtggtgtgccgccacctgtggatgggtaggacttgcttccacatgagccagtgtcaaggcagcttgaggccctcgagtcacagggagctgcactctgacacctcccagcggcaggaacttgggcaacaactcgattccctgggcctcagtttcctcacctgtaacatgggagtgtgcgtggattctgcttacaggtggttgtgaggatggagtgagatcatgtgcgttacagccttagaggagcgggagccctcctgttagctgtgtctgttttcatcatttgggtggctcacgtggactagcactgcaggaagtgctctaagaagcctcgtccaccttcctgtgtcttttgcagaatcttggtcagatgaggaaagtgccgattctgattaaaaatcctgggaggtgggaggcttctcagcgacacttagcaatctgttgagttgaacaaatctcgtgtcaacaggttgttttgcttccacctgaaatccctcccgctgtagtttcagctcgttattctcatcctgtcttgagtgcagcagcactttcccaccgtattcgcttccattttccagagatgtgctgagcatttcctgtaagccatgccctgtgctggctttgaggggacacggtgtgtttaggatgcgcccagctaacgaagaactgcagagtgggactggggtcactggagagggagaaataaagtgctcaaaggagagtgaggtcacaaccaactaaggtcatcagggaaggcttcttgaaggaggtggcatctcagaagcgccccagagcacagaagtggggcttcaggggcaggacatcattgtgggtggctgtagtgcccgggaggtggactggggcctgggttgtgctggaggccaggctgaggccctgccttggtttggggaggagatccctgcactccggaactcctctgtggcccacggaggatcgctctgaactgcctcagcgtggcggccagtgggggtaggggtggagagaggacagcagggagggaggggaaggggccaaatgagctcatttggtgtcggatcctgattctttctattccatagaccagagcttaagagctcagacttggagagcaacagaacagggtttaaattacactgaccccagggggttgtgacgattaagggggaggccagggtcaggtctggtctgcgagcgagtgatagcagtcatggttgaggatgtggcaggtggagaagggtcccttttctggcctcccagaggtctccatgtccccccttgcccactccatcaggctgaggcgccccagcatccagaacattcctgcaaggggctgccagtgccagggaaatgggggtgaagacgtcaggttcctgtctctgcagcctgaccctgtcccccaacacacacgctgggcagaaccgagccaccaacccagaggggaggtgccctgcagacggcccaggcccccaggcatgagtgcaggtgcctggcagccccctgcaagaacagctggtgggcagggccttctgggccaaatctcccttgctgatcacatcacaggccaccaacctgtctggaggacagcaagggtgcttggtgggcagtggaggtgggggtaagggaggtgcagacgcctggggctttcctagctaaatcccagtatggagtggtttgtttttttttttcagcagcagctctatgttgcctactcctgtcctactgtggtcctctctgacccttaaaggctgcccagccttatttagatatatgaccaggttcctattttctctttcctgtggtcacggccctgctcaccaccatccctattgatctttcctctctgcttctgtttcaaatgtcaaggtcatttttaattctgagccagttattagctgccccgtctgagtgcacagaggggacggaggaccatctcttatagccagtaaccggagagctggaacttgggtctcctgactcctagtctaatgctcttcttactataatgaaaggggaggggggctcagtgcagatgttcgagatctgatagatcagctgggtcatgggttccagtgatccttccttgaaaaggtaaaaagatgcttagagattatggggtgtgggttagatttgcatctcactaagctgttgagtgtgggctgtgtcctggggaatacttgggaacggccatggtctgggggcaggaggccttcggagtgtccctcccccgccactccctggaggaccccgggagacacaggcgagttcgcccctgcccctgccaagccagtgggattccccagcaccccagtgagcagaacctgtttggaaagaggcttctggaaggcctgcacgattacttgtataggttcccgaagtgataaataaatgcatgggtaaaggggaatccacttagattccctaaaagcctttgaaacaaggtggtaggcgagtctgttctgatgtgttagatccccatgcagtagtgttgtggttaaaaaaaaaaagttcatagtgtaatctcagttttgtgaaattctttaaaatcgatacaaatatacacatgtttaggtttgcacatgcatggaaaagttgttctggaaagatacacacaaacctgtcaacaagtttttgctttttaactttgtacactttcgttttctttgaaaaaatgtaaatgaacttgagttactttcttaatgacaacaacaaaaataaaactacactttttaaaagcctgtggatgagaaagtagaaaaaagaattaagtcacctaaggctgagggatggactcttttttataatggataagaaactggtttagagactgacagcaaggggtaagcttactcaggtacgtgtcttttccggaaaggttgcagggagaaatatcgcagatattaaggcctctgagcaaaggcctaggctggtagggattaggtgagagcagaaaataggccgctgactgcatgcaccctggcccacgccagggacaggggacaaagttagctttataggatggcgacttgaaactcatttctgacccaaagtggagaacaaatcactgaggatcttcccccaaaagcatcagtctgatgggctgttgtggcccaaatggttcctggggaactggaggtataactggggcccggcccgggtatggagctcaggtgacccagccctggcatagtgagagcctcttgggaggccacacccaagggagacaaagtggggcttcaggaggccccacgaaggggtagaaggggtgtctaggaacttgcttggcacgtgggttcaactctgatctaggggtccctgagcaggtggtgatcacccagatgatggggtggagaggtgaggtgggggcaaatacaagttcctctgtctgcagtcgtcttgctaccccaggaagctcagggctggttgcttagcaacagcacttaccaccctcttccaccttaccctcccgcaccccacccatgggtgcctcttggggcttcccttcccccgaggctgcccctgttcaataggacatgggaagggtctgtgcacttttttgaccctgcccctggaataaggcaggaacagacataaaaggacctatgacttggaggcaagcacagaactggcccctctacaaaccagctgtttaatccaaggctggtaggggacagatgtgcagggcaaaaaaggcgttcgggagtcaggccgacctggaggactgtctcagccccatttgtgctcagttgctgctggccccaaaccacctggagctgcaggtttttcatctgtaaatcggggataagaatagcagtctcatcttacaggggttgcctgaatgacgtgcaatattttgtgaaacagctagcactatgcctggcacagagaaggtgctcaggaggcatgagctgcttttctttacgtgggggttgttccagggctgcctggttagggtgacccccacaaagccctgctgctctgtaaggccctgctgctctgtaagaccctgcaagtggccaggtgcagtggctcacgcctgtaatcccagcgctttgggaggccgaggcgggtggatcatctgaggtgaggagttcgagaccagcctggccaacatggtgaaaccacctctctactaaaaatacaaaaatttagctgggtgtgatggtgcacgcctgtaatcccagctactccggaggctgaggcaggagaatcacttgaacccgggaggtggaggttgcagtgagccgagatcgcgccactgcactccagcctgggcgacagagtgagacttcgtctcaaaagaaaaaaaaaaaaaagacctgcaagtgtggcctgtcctccccatggcccctcacggtgaggggaagagataatcaagttgagaatgacccccaagcccatggtggactctgggctgggagtcaggggccacaggggagtggcagggatagagaaagatgtctctgtcctccttagcttccgttatctgacccaggtccctttttccagctgccaataagttgtccctttttctcttagcctttctgcacctccacttcttcctgtgaagccaggatttgcctgtaccttttttgatctcttcagagtcccctgtccatgtggggacccagtagcctgctcaaggcctgggccctctttccctccctgcccactggtctctttggagctaagcggagagtggcctttgctgggttctggctctgccccacggcctggaggcaggggagggtctagaccacagcccggcctggcagctggcacgcagcaagggctcctaatggttttattaccagcaacaatgtggtgcttgttgccatccacgcacaggctggtggttcccagcccaactggtggtggcctgagggccctgcctggtactggaagctcagctgggaagcccagtggggctgggcagtcagtcacctctgcgttttcttctgtcaacaccctgccagcagcctggaatcagagggagccagggcacggcatggcgagatgctggcccccgagttggcaggcctggcagcacttgagttttctttccagaggtccctgcctcagatccacaaatgatgttcatccattcatctaagagacctactgtgtgccagacacaggctgcatagatgaagggggtcacactcatctcaatgaccctgcagcttaggtggggtctggcagggcggaaggacccctggcacaccatgtccagggattaccagggctcagagaaggaagtcggattcagggggagagaagatctggaagggctttctaaaggaggtgacgcttgagctgagtctcgaagcggagggagcagttagctaggtggacgacggcactttctggccccatgtggctgcagtgtagggaacgatgggatacgaagccaggggcctgggccgggggacatggaaggcgggatgttatgaacggacgttgggcttgggatttatatttgagaaggatcattctagggcatcgaggacgagagctcgggcaatagggtttaggggcagggagcccgggtggaaggctggcacagaagtccggggcagcaatgtgggcctggacagggtgtgcgtggtgtgacatttaggaagtgcagtcagtaggaacaggcgggataaaagcaatgaggggagttggggtggctgtctggtttctagctcagccaactgtgtgggtggggatgcccttcatggagggggcatgggttggggggagtcggagagagcaggaggtgcctcccacatggagctgggttgtagctggggcttgagggcgggtgggatttccccagggggaggctgagccaggccaggcttgcagaaggaggctggagcctgagtcataaggcctggaggcggggtgccttgtgcgatggatgagaaaggcaggtgcatttcagtctgtaactggtacgacccctgcagatgtttgaaggaagattttgaggaaggtgctcgcacccttgcattgggaatgctgatgagttagcgcctctacttcacagtgatttccccaaaagatgagctgcaaggcctagaccctggccctccacccaggacctgcggcgagcatcatcaccgtctgagaatctttgggtgggctggaagttgatgtcaagctgtccagcctttccgtcactctccattcagaggcaggtctgcggagagagataggagggacaagctggggacagcatttttggaaagcaaacagaaaagaagcaaaaactgttcctctaaaatagaaaggaggcttatgtgtgttatgtgaaggataatgtggaaggctatttccaaagaatttctcaaaaaatgacgtgagccatgtcagcatcattgaatttagatagaggccaggagcagtgtggcatcgtgctggggccaccaggctggggactggacagatgatggtttcacctcacccctgccacctccttgctgcgtgtcattggaagatcactcaacctttcttaggctcagttttaccatctgtaaaatggacataacttcacaggctggtgttgtttgttttgagcattgcttcttggactaaacctggatattttttccttccctccctcgcttctgcacttcctctggttctttgcctcccaagaagcctgtttcctcctgttccctccaaaactccaagttttgagttcccccttcctgggaaggtccattcgtcatgttctattgactctcttgttcccaattattccctgcaaacctggttcacccagtgtatttgaagagcatctactgagctaaatgggagttattgggggtcagttcctgttttctttttaataaggggagggagggtctgtgcagagctgtccgggagagcagagggcatgggggacaggggggatgttgcaggacccagtgggaccacagctgggaccttgccctgtagctggctcagtgtgccaggggataggggcacagagccctggtgggtctgggagatgagcttgggaaggacttggcctggacatgggctaggctgccctgctttccgagccagacctcaggagatggcagagagggccgcttcctctgtgagggccgtacatgatggcccttgggctgtatggtggccttgtgacatgcagccacacccctggggagacctttgaagcatctctgcattctggaggatctgctgggaagatggcttcgcagcggggctcttgttgatgctgccaagaaggccgggtgggagtcgggctgtctctggctgggggtggggtgggggctgcggtccatccgagtgtggaaatccacgtttctctggtttgtgcagacctgtgcaagcagccatgctgcaggactggccccctggaagtggggcatacatgaactcagggtgtggcgttgtaatcaaatgaaatgtacagcataattaatctggcatacccttaatgatatgcataattgtgctgcatggtaattaggtgtaaatggtaagcagttcacataaatgtttttgtaattggtattaattttgcagaggcaaaccaagtttatgtggtttttctcttcttgctctgttagttttctagtacaggcatttccaagcttttggaggaattctattgcaaatgtttgtttatagggcaatgttttgtgttttctctcagaacaatgttatgaatggttatgaggttcccaagctggtttccaaatgcctctttggcccatacagtaggtgaaatgtgcaacgcgtgtgcctgtgtcggaaggcccgcccagcatcctctggctccaggtgccccagcgtgtgcagcatgaggggggctgtgtgcgtgtgtgaacctgtgcgcctgggtcatctctgcatttgtctaggtatatctctgtgtgtgcatctatgtgtgtttgtatctgtgtgtctgtgtgtgtgtgtgtgtgtgtgtgtgtgtgtgtgtgtggggtctgcatgactgtgagagactcctgaggccacagtggcaggtagacattctctggtaaatacattccccattctagtggcacggggcctgggctggagacttaggggcatcagctgggagggggagcctggcacagcagccgttcctaggagtgagcacaagccactctgaagtgtggtctgaagccagagtctaggtttcctaagaacatatggcttgcctttctttctgatcaagcacataataatttttaaatgatcatttattgagtacctgccacgtgccaggccctatgttaaacacttgactcagattccctcctatcttaaaatagacttatgaaatagggactctttctcaccccgctttacaacttgggaaactgaggcccgaatctctcagtgacagagccagggtttgaggcagggactgctggaggcagggcccatggttctgagatgtgctgctcagaaccctgggctcttctccctccctcggccccctccacaaatggtttgtttttgttgggacagacgatgaggagaaaggcggccctgtgggaaatctgagagcagcgagctcccttcctgctgaattggttggggtggtgggggacgagctccaacagccgctcccaagccctgaagaccctttgggggacctcctggttttgacccaagagggagctggtttaggaagtggggttgggggactgtggccatggacggtgtggggagagggtggtcacaggccagacaaggactcagcccccctgattcctgtggttcactgatagcctaggccctcaccaaccccttcaccttggggatctggggcaggtgagcctacagacccacagcaggtgtatgttctgccctcggagctcctgcaaacagcctttccactgacgcagtgccttgggggctctgccaagcgacccctagaatggggattgtggggggtcgctctaggcaccgcagcactgtgctggggatgttgcagctgcctgggagtgacttcacacagtcctctctgcctccagggtcacccggaacggggttgcgggggacaagctgtgggcgggggggacgggcagcaagatacaacgcatgaactctgacctcgtctctttgagaaatcagacacatctatatacgcatggaacactcaatgacccctgggtgggtggtcgaggagaaggggacggtgttttgggggaggagagatgttgggttgaaggactgggagagaggagctgagtgggccctgtgggagagggtgggagccaggggtgtcattccgggacagcagccgggcctggaatgatgcagctgggagaggtgggggcacggccagagcagtgggcggaggctgcgttgtagccagccctggtgagaccaggccagagcgtatattttaccacgtgtgcaaatctttggcatcaccggatttttaaaaataatagctttaagatataattcacattccatacagttcacccatataagtgtacagttcgatggttttagtacattcacaatcaattttttaaaattgtcatgaggtgtcataggttttcatagagggagccatgtgtgggcaatccttgctgatagggtggggtgggaggtagagatgccagaggcaggtggacccgctccagggcatctaccaggttattgtgccacagacacaagaggtacaaagggcctggagggaatagggggacgagagaagcccaaggaccaggtacctgctggatgtgaggacccaggggaaaggtgggacctgagttttctccagggtttgggacttaggcagctgaagggaggggaatgttacttccacatagagggaaaaaccagaaaatagagccggctctgaaagaagcatgttctggaagagtaggattttagggactgcaagtcatccagttgggatgaaaataaatagagctggagcccctggcagtaggaggcgtatgttaacttatgcccaggtgtcttagaggaagagcatttagagagaagctgaaggtagaacatgacctttgaggagcacccaccgtgcagaagtgggatcaagactcccggacagccccagagacaaagctgcagaatctgaggctggagacccagaagcaaggagccagatggagtcatggctgggagagaacacacagaaggcagttgctggtgagctccagaagcaggggtctcctttcactccagggcccggctccacaatggcactcaagaaatggctgttgagtgagtgcttgaagcagggagtgattagctggccaggatgttgaattgagctcaagggccatgaggatggaaaaaagccctttggggccgcgggtgactgtatcagtcagggtccattcagaagacagaaaccacatggtgattggaacaaggaaagtttcacataacgaattattaactctaattggattggaataatgaggaattggctagtaagaagtaaaaataactccaaagaatacaaaaataatagatatgagaacagcccctacctctagggttgccacagagtgcccaaggaagaggccccgcagggttgagatccacaccttgatggagagggtgtggcgatggctccctggatggcaacgtctctgtaatgccatgttggcagaacttgctggaaatccaccctctggaatttactggaaatccatctttttgggtcccaaggaaagttgtttgtgggaggtatcttgctggaagcacaccgctgctacgttttcccaggggagtgctgggagaagctcctggctgttgggtactcctgactgacgtgttgctggagccaggtgctggagaagctgtctgcattgcaacagcctggcactcctgcaggagctgggcactggaaagctgcatgctggagaagctgcagcagcacaggagctgggtgctgggaagcttcatatctggcaagaccctgatgctgggaagcgcccatgcagcaagatctggctgctagagaagttgtatacaatgcaggaacccaacaagagcacactgggtctagaaaggaaacccacctcctccttcaatgcctcttcagtgccctccacagttgtgccagctgacaaaggaaaagtagttaaagggcccagctccatcttcacagcacaggcaatgatgggcgaataaactgataactggcacagtttacccctttggctgcacagcttccatttgcacctttctacaacatctgaactcccatacaaaaacaaacaactggatgtctacctatcaagatagttatccttcttatgaaattctcacccttttgcccagagagccccaaccatcattctaccaatccctggctacaataacttctcaaagtcagtcacagtctcactgaatattctgttacctaaagactacattataaagctaactgtcaacaacttgtatagaaaagaatgggaaggagaaaaaaagaagaaaatgattaccatattgcaaacacaccacacacacacacacacacacacacacacacacacacacacacacacacacatatatatcaagttaatagaaaatgtgcaaaaccactagaggcctggtttctgcatttgttcacaaggctacactttacacttgctacctggcttcattgtcttcttatcccattctgtgtttcctccacactcagccagagccttagcaggtcatgcttcttttacttggtggagtaacccaaaccctcattcccaaaggacctgaatccttagttatcccgcttttgttgttgttaccataactttccattcagccttcctttgggcatggacgttcttaagaggtgcctgagagaattcgctgggttccagacacagtcttgcttggctctgtggctgatcagcaatccagttttctccttggtaactaggatcaatcactccagacagtggcataactccttttttccactgtcagttcagtggcgtaaggagttcgagaaagccaagtgggtgtgtgtgtcttctctcccagggaaagcattataatatgtccctggtgggagcactctcccccgaggacgaggtcagcatccccagaaggttttagagttgtggggtggggaaacagggccacgcgcaggggactaagtgatagaggctctggagctggcagctgtggaccatgctgtagagaaggttggaaaagtagagaaacatgcagatgaccgtgggccgcttccgctgtggatgataaaatcagacccatgctggtcactgccagaccccatccaggaccatgtgtctgattctcacatggactctgtgccaccctgtgcccctgactcccaggccgtgggaagcccatctgacccacagcacgtgtgacccctagacagggcttctcctggcttgcagcacttggaaatcggtgctgccttacggaagtctgtgttggctcattttggctcctgagaacaacttcagctccttaacagcatctattttaggtataaatcccccccccgctcacttttggggctgtgtcatggcaaccattagtgtgagcaaagcagtctgactcagactcccatgtggccgccgtagtggcagcaggtttggtgtgatcataagtgctcctgctggtggtgccagtgctggtggtgccagtgctggtggtgccatggcctcgagagtggtgtgagagccacaagccgtcttattgtgactctagagccagataaatcagctttgcagagggcaggactgctggcctgtcaccagtggcttttggtattctatggacagctggtagtttgggtgcaagtaatgtttctgaaagtcagggcaatggaatggtgatggccatctcactggaaaatggcaccaagacccccctccctctccctcctccttatccatccccagtcttatgaccaagagaggttgtgacaggagggggaagagttgacagatagacatctccgtctaggaggtctcctccactttctcctggcccctagctgacccctaccctagcagatgattgggcagggggtgggggtggggcacaagatactctgctgccttctgtcacccacatttgcacctcctcctaagctcaaataggaaatttagccatgggactgttatctgtgggccagggtcaccccagaggcacaaacatcgatcatggcgctggctctgagatgtgtgtttagcatgctcattcatgaccaagaactgccacatttgcgaagggttctgagttacacggacctggatttataatcctgccctggggctttctagctgtgctaccctagagaggtattaaacctctttaagcctccatgtcttctataaaatggggataacaataggacctgcttcataggattgttttgaggattgaggatagtgcatgttccttagcacagtgcttggcacatggtaggtgctcaggaaatagctgcatgaatgaatgagtgaatgaccactgcattgggcagggcattgaatactgtgattagcatgctccagtgccctccttccccgctcccactgcagacaagcctgaccaggagagagagactgactggaaactttgttttctggccagtccgtgcccaaagttaatatagatctgcagcagtcacatgctgattgtgagagagggagtggagagctgtgagcttctgagtggggtggacctggactgtgcctggctccaccccttacccactgtgtgaccttgggcagttttattaatctctccatacctcattattctcatctggaaaatggggataaaaatagtacccacttcaaagggttggggtgaggtgtgaggattaatgagatgttgacattgtaaagctctgctcacggggcctggcatgtcggaggagcttaagtacaagctcctgcctgagcgaaggccacttagaggaactccagggatttcaagaaaggagagaaatctgcgggctggttgaatctgagagtaatcatcgttaagatttattgagtactttctctgtgccaggcgctcttggaagcatttttagggcattccattttaattttcacagcagcgctgtgaggtggaaagttctttctcccactcgacagctgagaaaactgaggcacagtttcgcctcaggccacacagctggtaagaaataaggccagtgttggaaaccccgcagttggcctcccagggagccctggaggggactgagattagcccttaggtcaggagggtgtcaaccacaagtcatagactcataccaaagtagtgaaagctcacagtccccggaagttcagagacgtccctgcctccaggaacagcaagaccaggggcccagacagtgactacaacgctttatccctctgtcttcatctctgagctcttcgttctcaggcaggctcacccacatggcgggaagacagcagctggcagcccctgactcacatcgaccatgttagcatccttccatcgcatcgataaaaaggttccagggaggcctctgattggctctgcctggtcacgtgctcaccacttgcctggggtgagggttgaggtcagcacaggcacaacgaaaaccttttgacaagcgtttcccaccgggaaggaggggaaggcatctaggtagagcagaacaaccagagtccactagaggaaaaggagaatgcaagcagagggagggagaaggacctgctacagaaatggtcagatatttttcagccattcagacagagaacttgagacggagaagaaggggcccttagggtgagaatattgggatcgtgtttggtggagtgaggatttaggtttgtgggccgtgacagttttggttttggaagaggataattatgtgcaagcccttgttgaggagagactgtggggtggcaggggggccagcagtcctcaatctgaagatggagaggaggcttgggtggtcatctcgggggtgctgatgaggctggggttggtgaggaagtgggggcggcagtggggacagtgtggtgcaggggagcagtcctgaggcttcaggagatggtggagatgtagctctttggtctgagaaggggctgagtgagcgggggttggggttacggatgcaggcagcactgacttgcgctgcccatgggctggacgcagcgggaatgatgtgtttggaggattaaacatttcgtgagggtggggggtggagagggaggtaccagtgttgtagctggtgatggaactctgtgtgggtgtgaggagctgatgatggttattctgtgggacgtgatgatttcatagaacaacagaggtggaaaggcctcagctacactcttatttatagagaaggaaatggaggccaaacgcaaccgatggctgcagttgggacgtaagccctttctcccatccccactctctctgtttaaaaattcatttttatttactcacagtagtacatgcatataatttaagaagtcgaatagtactaaaacctcctaacaaaatgcagtgattccttgcctactcctacccttatcctcttctcagaggcaaccgctttcgattctcttggctgtttcttccagcaattttcatctcatatttctgagtaaagtgcatatttttgattcatctatttagacattttccattgatttcctatttagtagatcctcttacatgtccaacctttctgctcttcagccatcctccttaaatattgacagtactcttcttatattttttcaaaaaattgtttgttgttgattgttttgagacaggatctcgatctttgcccaggctggagtgtggtggcacaatcacagctccctgcagcctcgacctcctgggctcgagcgatcctcccacatcagcctctcgagtagctgggactacaggcatgtgccaccacactcggctaattttgtaaatttttgtagagacaggatctccctgtgtcatcagactggtcccaagtgatcctcctgtcttggcctctcagagtgctgggattacaggcatgagccattgtgtccagcctcaaaaatgttttgtgcatttggtagccagaataatggcccccctaagatggccaggtcctaatcccctggacctgtgaatatgtcaccttacatggcaaaagggactttgcagatgtgattaaattaatgacctagagatgaggggattatcctggattatctgggtgggcccagtgtaatcagaagggtcattagaagtgaaagatggaagcagaagagtagtcagagcaggagatgttgatgaggcagagagtactgtgatgggaaaaagactggccatcgctggctttggagttggaaggggaccacgtggcaaggaatgagggcagcctctagatgttgaaaatgtcaaggaaatggattctccttagagtttccagaaaagaatgcagccctgccaacatcttgagtttagcctagtaaggagaatctttttttttttttactactgacttgcagaattgcaagataatttttttttttgagacggagtttcgcttttgttgcccagggtggagtacaatggtgccatctccgctcaccgcaacctccgcctcccaggttcaagtgattctcctgcctcagccttcccgagtagctgggattacaggaatgcaccatcatgcctggctaatttttgtatttttagtagagatggagtttctccatgttggtcaggctggtcttgaacttccgacctcaggtgatccaccctcctcggcctcccaaagtgctgggattacaggtgtgagccaccgcgcccggccgataatgtgttgttttaaggcattaattttgtggtacatacaaaagtaatttgtgtgtacatacatgcatatatacatatatatgtacacacacatatatttgttaaacctacacacagtgtttattttattatttcgataaaactattattcacagctgagccttgtggtgcactgtaatagtttcttttcgtttttttttccctgaagttaataattaccttgtttctcatctgccttatttttttgtacctgttgctaattcctaccacaacttctaatataattttatttttctttaacaatactgttaccttaggacttctttttctttttttctttttaactgacacataataattgtgcatctctatggggtacaatgtgatgtttcaatacatgcatacattgtgtaatgatcaaaacaggatagttggtatatccatcacctccagcatttatcacttctttgtggtgggcctaccacactttccaatagccatcagtattgctttccacacgggcagtcacagcaggtaaaagatgtttcagttccattttttaagttatctatcctctttcactctgggctagttgctttctaggcacattgtagctgatgctctgtgacttccttttgtggtcatctttggaattcccattactttccggttggaatctctgttttctggctttcgtgtcctcctcatgcttggctcactcccctcattagagcacatcttccaggacacacatctgtccatatcaaaatccattcatggctgggcacagtggctcacgcctctaatcccaggactttgggaggccgaggcgggtggatcacctgaggttaggagtttgagaccagcctggccaacatggcaaaatcccatctctactaaaaatgcaaaaattagccgggcatggcggcgggtgcctgtaatcccagctactcgtgaggctgaggcaagagaattgcttgaacccacaaggcagaggttgtggtgagccgagaatgcgccactgcactccagcctgggctagagagcaagggtccatctcaaaaaaaaaaaaaagaaagaaagaaaaaatctattcagttcctgggtttagatagcagagtatggccacgagcgatacctgtgtagttttgtcaggtaaaaagacagttcgacagcagagggcatggtgatgacggcactcgtgccccagtctcagtgggaaggctggccctctctggctcatgccaggtgactggcatgcggcctcttttccccttcatcctggagcctcccttcccatctctcctgtactggatcttatgcgtattagaggacatcttcctgtccttcctgggaaaggagcgtgaggcctcatatgtctgaagatgtctttactagggcccagcacggtggcttacgcctgtaatcccagcactttgggatgctgaggtgggaggatcacttgagcccaggagttcaagatcagcctgggcaacatagtgagaccccatctctatttaagaaaaaaaaaagaccccgggcgtggtggctcatgcctgtaatcccagcactttgggaggctaaggcgggcggatcaccaggtcaggagctcgagaccatcctggctaacatggtgaaaccccgtctctactagaaatacaaaaaattagccgggtgtggtggtgggcacctgtagtaccagctacttgggaggctgaggcaggagaatggcatgaacccgggaggtggaggttgcagtgagccgagatcccaccactgtactccagcctgggcgacagagcaagactccgtctcaaaaaaaaaaaaaaagaaagaaagaaaagaaaagggccaggcgtggtggctcacacctgtaatcctaacactttgggaggccgaggcaggcagatcacgaggtcaggagattgagaccatcctggctaacacggtgaaaccctgtctctactaaaaatagaaaaaaattagtcaggcatggtggtgggcgcctgtagtcccggctacttgggaggctgaggctggagaatggcatgaacccctgaggcagagcttgcagtgagccgagattgcaccactgcactctagcctgggcgacagagcgagactccatctcaaaaaaaaaaaaaaaaagaaaagaaaaaagaaaatgtctttattttactctcacacttaaatgataatttggctgaaaataattctaattggaagattgtttaagatttggtttattctttaagaattttggctgggcacggtggctcacacctgtaattccagcactttgggaggccaaggtgggtggatcacttgaggtcaggagttcaagaccagcctggccaacatggcgaaagctgtctctactaaaaatacaagaattagccgggagtggtgacgggcgcctgtggtcccagctactcgggaggctgagaaatgagaatcacttgaacccaggaggcggaggttgcagtgagtggagatcatgccacttcactccagcctgggcaacagagaaagactccgtctcagaaaacaaaaacaaacaaaaaaacccaactgatcggaagctctgagaatgatagtggacttgttggttttcaagtctacataggctgacctgaataagtcattttgaccccattttggtactgatgttggtattggcatccttaaacctttcctcttagactcattcgattctccagagaaggaaatggttgtctggctgccagtattcttagagcccaatcggggaatagcctgagagactggacatcagcatttaaaataaccttcccggccggcgcggtggctcatgcctgtaatcccagcactttgggaggctgacgtgggcagatcacctgagattgggagttcgagaccagcctgaccaacatggagaaaccccatctctactaaaagtacaaaattagccaggcttggtggtacatgcctgtaatcccagctactcgggaggctgaggcaggagaatcgcttgaacccgcgaggcggaggttgcggtgagccgagatcgcggcattgcactccagcctgggcaacaggagtgaaactccatctcagaaaataaataaataaataaccttcctctccttggtttgatatatcatctttgtcttcagctgtgccaagtgactctgtgcaaagaccccctattttatgccctccagtgactacagataaaccttcaaacttgtagaagagggtctaggaattcactactctcactcagcctctcgtttctcacacaagcatcctcttcagccctagtgccagagtacctggtgctgtcatataagcatctgttgaagactgtgttatatatcagcgttcacacgcctgtctgaaatttggctgtcacaagtctgctttccagattccacaattttgttggtggtattccttctcttgttcagcctaatcttgtgattttatgtcttaaaaaatcttttggccaggtgtggtggctcatgcttggaatcccaacactttgggaggctgaggtgggaggatcctttgaagccatgtgttcaagaccagcctgggcaacatagggagaccctgtttctacaaaaaaaaaaaaaaaagccaggtgtggtggtacatggctgtagtcccacctactcaggaggatgaggtgggaggatcacttgcacttgagcccaggagtttgaggctgcattgagctatgatactgccactgcatccagcctgggtgacagagcaagaacctgctctaaacaaacaaacaaaaaatgtttctattgcattgagtttagaaggtagtgagccttggtatgcatattcaaagctttcagttctttttccacaacagttttatagttgacgcagtggagatggtgatcatatcagctgtgatacgaagatgttttcatggtgggattccttgaaattttttaagtggctgttacaaacattattcatggtcactgtggactctaaaaggaggaaataaaagctgcttttcatggtggtagggttcttggcaagggttttttggtggcagtggtggtggctgtgcagcccttggcccaggtgggaagaacgctttggtatcggaagcagccagggctgtgcggtggaaggaccgatgtggtggacacccgctgctgtgttgggactgtgggcccaggagagcccactccccatggctgggctgcctgaaggaagaatgaagcgtctacgggtaggtgggcaatgctatgtcaaggtctgggaccttggccaccaactggggccccctagagttgtgtagtacatggcccgcccagacacatactggaggattttaggtgatggacacgattttgagggactgctactgacagggctggtccattgagcaacacgaaagggttgacccaggtcagctgcattttctgtgaggacagtttctgcagctcagatgtcagagtcttgggtggaggaaggggaggaggaagagaatcttcctttcctttcctgtctggggtgtctgcccttggggccaatgccctgtgaagttctgcttttccctccagcttccttcctctccagagcttctctgaacctcgccacacccgtggcggcacagatgccctctgggtgtccctaagcctagggcagcatcaagacaaccctcccgccccgcttcctttgtgcctgggtctcccccgactccatttggggtgccctgtccttgtcagccccttgtgtgtccactgtgcctgtggggccgcaacagcttccttggccggtcagagctattaatagaaggggtcctgctctcccatttcattggtggggaaactgagggccggggaagcctccgtcaggagtagatcccacccctgcggactttgggctcaacgttctttccaatcagactctgcccctcttagcttctgaccctttcgaaggtttttgttttagtgtggctggagatgtctgtggtaacaaatggggagtgaggcttgacagggaatcactggctgctaagggctggcagccgagtgcttctgggttggaccagttctcttttgggatcttcagagttgcttctgtggtgtgtgttgggggacgtgaacccaacccctcagaactttagtgtcagagagatctgggttcatgcctctgatgggtcctggccttgttgatcttaccgtcacctgtaaactgggcacggcacagcagctgcccagatgcagagcacgagccaggccctgagtggcatgtggccgatggagctgctctccgctgccgtccaccctctcgggacccgggcagcaaaccttccttaagcccagcactgcgctgtgcctaggggtatggggaatggacgcagtgcacctgggctgcctcagggctcagctgtggggcaggtccgcttcaagcctttctgggttgacctgatggagctcttcctgtcctggccctaagaagctcctcctgccagctccttcctcccactaccccctggggcacagccagggctggggcacccactcccaggcaagaatgcacccctggagaaaggggctaggcctgtaggagagccaagcctgtgctttctcccggtcctggttttccagggagccctgactggagggggatgggaggagaagcccaggagggagggggagctggggaagcagaaccaggaactggaaggggaagggtgtgggtgggcccagatccagcctgcctcccgctctcccttgcctgccaatcccctcctgggccctggcacactcaaggcaggggcttggcggccgcctcctccgggggtggggagcaggggagctcttgtgtgtctctgagtgagggggctgagacagcaacacccccaccccagctgtggcctgagctgcaggctttgttatttctctggcttgaggcctacacctggagcagagggaagaaaagcccctaaactcagccgtgtgggttcagaggacccctcaagcccaccaactctgcaggcaaatgaggctggttcatggggtgggggagagagcagcctcactcctgcctcagtgtggccgtggcctgtggccttggccgtggccgtggcctctccctcctaggccagagccaaccaggcctgcagcctgagctcagacctcagctttctctgggcccaggcaccggtcctgaagtgaggtgacattcatttcactacatcctgtgactgcactcacttcctccacgtggcgggaggtgtgggggtgggggtgaggacagattagaaggaaaacgtagctgggctaggggcctctgggggaggctgggatttcccaggggctggttggggtgggagggaggatgcgggaagctttcaaaggagagagaggctgtgaatgaagagaagggaggaggcggaggcagctggaggtcccagaagtggcacccattggccgcagcgacacggaggggagactgctgccactccaaggctctcagaggctgctggggtaggaggtggccctgaagggagcctgcctcggtttctctgctctctggggtgctggtgaggccagaaggaggagcaacaccccaggcctcacaggccaggtgtggccctgggctgagggcctgacccagggagggtggggtgctccgccccactgatcctcttctctcccccacaggtggagccatcgaagcccccacccacaggctgacagaggcaccgttcaccagagggctcaacaccgggatctatgtttaagttttaactctcgcctccaaagaccacgataattccttccccaaagcccagcagccccccagccccgcgcagccccagcctgcctcccggcgcccagatgcccgccatgccctccagcggccccggggacaccagcagctctgctgcggagcgggaggaggaccgaaaggtgagcagcgggctctgctggggaccctctggcctgggagagggagagccctgtccctatgtgatgacagccggctcctcatactgagtgcatgaccgcatcactcagtgctcacgacagggtgtgggaccatcacatccctgtttgggtgatgaggaaacggaggcttgcagaggttcaattctggtgatggagcaggcatttggttccaggacccaggcttttaaccaccatggcattcgcacagtggctcaaagcccaggtctgtgccattgtgagggttcggcctcacagagagtcccagaacctggattccttctcggacccgcctcttactagccgtgggccttcacgtgaatcactttctctctcagctgcctctgtttccttaaggtgttcagtagcttctaggggaccaaagacaagttctggggtggggcacggcagacacgaggccgcgggggcccaccctcccacacagacggaggcacaggctgggctcagtgtggcgccagcacactttggagatggtgatttcctgtccccgccccccaccccagactccaggtgaatgtcgctgggttatctttggtatggcttttggccacggagctggtgacctccatgttttcagaatctagttgggggtggcctctccacccttctgctgaactccaggttgtgcctgaatcagtcagaggagattacatcagactgatgggagtccctgctgggtctccacaggctgtcttgggaccttaccaagctgtgtccccatgataggaaaagctgccccttaacccccagcactggactgtgttgccctctgtcagtggaatggtgaactcactgccaccctccaggggatcttatgatggccataggccttcctggcatgtctgtctgctgtgcctctgtccacagttccccctgcctgctccccttcccctgagtagcgctgggggttgtgctgcttggtggtgtctgggagtagctgggcatgctcatgggggcaccagttggttcttttggaacaaaggtggacacctggcaccagctttgggggccctgggcactctggggctagaggcagccagcaccctacctgaagggtgtcagctctgagacctccctcttgcgtgctcagctccttcctgggtttaccattcttcagagtgtgtttctgtttcctagttttccatcaatggttctatttggtccttggggacaactcttgaaacaaatggggcagggacagatggccccagtttacagatgaggaagctgagccccgctgggcagtggcaggtccagatgacagcctgttctcctgtctcccaggtccgagcccttcccacagccctacctgcataggtcctgctagggacacatgtacacatcccaggagtgcacatgacgcccagggacctgccttcccagcccagcaccctgtagagcaccgtgggggtgtgtgcacccagtcagccagagcaggtcagaaagccagcatgcgctgcggcccactgggcaggacgcccggggcgaccgatcaggctcctcccttctgaatccatgggaaaagaactgatagtcctggatacctgcgggcccctaggctgcccccgctcaggactcaagcagcatgaagacccaagccctttggccgtagagttggggacacctgccgctgtctgtgctctggagtggcaactgtggccatggctgactccctccccttcttgggcctggcttgctttctctgtcggataaggtgaccccgagcgtcgccccactctgggtccgatgtcctgacagttgctgacgcagctccccatcaatgcactggcagtcactggtcagctgctccccacaggtggggagggtggggacagctgggacaaactcctcctgttactggactgtactcccacgccgctgctgctgctctgggctgcggagccccaggccaccaccaatggacgggagcaggtcaggatctgcattataatagctcaggactgagaagcaacgctggaccaggagtcagaaatcccaggtcctagtcctgagtatgccacttactggagatgtgacttcaggccatctgggcttgtgtttgctcagctggaaaatggggatagtgactccagccttgcctgttttaaagggtggttgtggaagtcagataaggtcatgggcatggaagtgacctgcagacagcaaagtctggtccaattatgagggattacgattgctattattatctacccatagtaactgctctggctcaagcggcaacaaacacacacccagccctagatcccggtgctgatagagtgcacactcacaccccagcaggaggggtcatgccaaaagatggcagtgatctggatagataagggctgggccatagccaggcctcctccccagccgcccacacctacaccacgcatgctggctcacctggcacacttccccggcacctctgggctggctccagcacctccagggagccgcccagggagggtggggagagacactgacagccaccacagcagcccatgaaagccaggcctgcggcaggggtgctggtagctgcagaggggaagacacaggcttggtctgcagcccagggagcctggcacaggtgccaggggcactgtgcacaaaggaactgtttggcaagccagatggaaggggtgtggccaaccaatggcccttccactgcctggccccatgtggccctctagcctctgcccaccgccgccccccctccccgcccccgcccccagccccgcctccatgcacctttcactccagccccactcccatacttcctggagtctccaggtctttgtttatgctgctccctctgccgcatgggccctttccctaatctcttctcctccctggtcaaagcctcaaagcccaggctgtagttggccttgtattatagtttgcaggggaccagtggttctcaaagtgggatccccaaatgagcaacttcagcatcacctgggaaggcaaagctcaggccccattccagacctgctgagccagaactcgggggatgggacccagccgggcacctttaaccatccctccaggggatactgttgcgcacagatgttgagaactattggtgtagataacttctgcccactgctagcctggagcgcagggtcacggcccttttcttccatgtgaatcccccggacctggaatagcacagagtgggtgcttgggaaatattttacggatagaacggaaagaaaaatgagagtagccaagaccctcccacaggagaataatcccggagcccaggatcagggaggcggagtgcagagctgtgggtgctgggctgaggcagccatgctgtggctgggagtgtacagagtggcctgtgtgtgtccccctggcacctgccgcctgccctacccgccatccatatggtgggcagagcagggctgcttggggagatggggaggaggcaggccgagctctggggctgtggtcagggcgagtcagctggtaaatgttgccgcagcagagggagggggctggcctcatggagggtgggtggggaggcaagcagtggggaggctgagagcttagaggggagtatggagcagagggtggggggcagagggagcaggacaggggaccaagaacagtccaagggccacctcagatccccaaatatgaatcagaggggagtccacagccccaggccaggcccctgttctcagttctgtcccctttcctctggcctcagaaacacaatggctaagatgcattgaacgccgactgccaggtgctatgtgcatgcattatcttattccattctttttttgtttgagacggagtcttgctctgttgcccaggctggagtgcagtggcgtgatcttgtttcactgcaagctctgcctcccgggttcacgccattctcctgcctcagcctcctgagtagctgggactacaggcgcccgccatgcccagctaattttttgtatttttttttttagtagagacggggtttcaccatgttagccagcatggtctcgatctcctgacctcatgatccacccgcctcggcctctcaaagtgctgggattacaggcgtgagccaccacgccgggcctatcttatttaattcttacaattgccgcataaggtagacactattattttcatcattctatcttattaagggctaaactgaagctcagagaggttaagtcacttgcctagagtcacacagcttgttaagtgctagtgctgaggctggaatgaggctggcttctgcgctccttaggctgtctcctgcgtgaagggggatggagtgaacagtgccccccggtggtgatgtgatgagaattcgtagtcctcccctggacttttgctgcaggagaaagcctttcactgcataatggcgctcttgcccttggggagaagttgggggcacttcatctccagcaagaactgcacacaccacctgcgtgtacaggcacacacaccagatggaggcactgctgcagacatgcagcttcttaccatttcttcctgcctcctgccctccttccttccctgcctctccctccctggacatacagctcctcttttcttctcttcctccctccctttcttcagacataggtacctttccaggtagttagcatgtagcagggctccgcaaggctgttggatgaactgagtgaccgtgcttggagggcctagtagaggggtaggaagacatcgaggtgggtaagccatgcctgccccccaggggtgggtgaggcctgctgggcagctcctctgatcaagccttctcctgcctgtagtagaagctgcagctggggtgcatctttgtgctggggaaacacagcacttatgtgtttgcacatgtgcgtgcgtgtgtgtgtgtgtgtgtgtgtgtgtgtgtgtatgcatctgtgggcagcattggggctgcggttcctcctttcccctccccatcaaagtctggcccagaggcctggcagccactgatttctcgtgggctctctccactctggtctgcaagtacaagggcctccatccttgggtggggtccctgccagttccagtggcagtcattcttgctgcccgcggtctgtcacctgctcctgggcatgttctgcctttcttgcactcagatgcccccacatggtcacttagggctggctctttgcttgacagtggttgcggtaaggtcatttcaaagagcatccttcttagtatgtttaaatagctatagaaaagccgctgcaccctcacctcttcagagacccagccagcgataatggcgcgctcactctgatctcgggggagttaggagagggttgggcgtgcttagcaggtttgtgatgtaaacagtgcccatccctgagctgagcaggacctacattttgggcttcggtttctctaaaattctcttaaattggacattattacatgtcaaatgtagttaatcttggtcagtacagtcttggatgggggttgtttggcccctgcagaagggcctgtgttgaagctggactctgtcacgtgacttggaaacatggctgtgagcaggaaaacagctcctagttggcttgagaggttcagacgagatggtgtgtgcaagtggttaacaccaggacatagcatatgttaagttagctttataatttattttggatatctacctacccatccacccacccacctacctgcctacctacctacctacctacacctttgtggtttacacccactgccgccccatgaattgcaggggcgtgggagaagagtaggaaaccatgggtggggacagagtgtgggcttagagtccactgagagcctagcacgtgaagggaatgttgtctctctttgggtcatcagtcactaaaggcctgagttccctttatcccttgaacaaaagtaaaacaaggcaagtggtgatgagacctaactcctgatggcaggggctgtagatcccttcaggggcctaggtgaggggccacagtcacttgggtccctcctgctcttaatggccgggttagggatggagcccagccctgctgataaggtgagtcgcccagggccagggcaggaaaggccaggctcagctgtgcagaatagaagaatgggccaggcgcagtggctcacacctgaatcccagcactgtgggaggccaaggcagatggatcacttgaggtcaggagttggagaccagcctggccaacatggcaaaaccccgtctctactaaaaatacaaaaattagcccagcgtggtggtgcgtgcctgtaatcacagctacttgggaagctgaggtgggagaattacttgaacctggtaggtggaggttgcagtgagccaagatctcgccattgcactccagcctgggtggcaagagcaaaactccatctcaaaaaaaaaaaaaaaaaaaaaaagctgcggtgtgtggtggctcatgcctgtaatcctagcccttcgggaggctgaggtgggcaggtcacctgaggtcaggagttcaaggccaacatggtgaaaccctggctgggaaaaaaaaaagaaaaagaatagagctgagtggtggagcagtgtcccaggataattgggaaatgagcctttcctctctggtacctgggcttggcacaggagtcctggtcataccctgcagctgcctctgcagagagccacagggcattagggatattccttgtaatcatcccacgtaatgtttgtgctgcgtggaagggcatgtaaaggagtgttctctgcacggtaattgactcattctgtcatcatgattagttagggggcgcccagagcaggatgatggtcagaggttcctcatccccattttaccgatgaggaactggggcttagagaggccacacggctacaaagtagttttatctggatcttcccctctattaagcaagggctggcagagctgggtgtgctactgaaggagcagacatgtgtgggcttggtgccatggaagtggccacaggcagagcagtagcacactccagtctgggctcagcatggcatcaggtacttgtttacatgttgttgtctccctctgaaccgagtttcctatttgtttatctttgtatccagtacacagtaggtgctcaatagattttttgagtgcacccctgtgtctggccttgtgacatagagacctcagaggtggacagggctgaggtgtgctgctcgtgggtgtgaggtctggcccaccctgcacctccagaagacaatgaggccccagccaggtggacaggctgtggacaaggggctgcagccctggcacgagggcctgggaaccagatgggcaccaccgttgtcagctatttagcatttctggaacacctctgtgtgcaagtacccaggagctgtgggggactcagaggcgccaatgagacacggcccctcccctccaggagagtggcctttcaggaggatggaaggctttcctcggtaattatgacacgacctaagcagtcaatggttacttgtcggatattgttgaataattgaaataaagggctgatgagccttgggaggtgactgagatcagaaaaagtagggggctttggagggctctgggcccatgcgcatctacagtgattcccagcccactgcctgacccctcacgctgggatcagcctctgcaggttggcctgggcacgggtgtgtgtgcaagcatatgtgagtgtctgtgtggcattggggtacgcaagcgtgtggctgtagctctgcagagcctggtgctcaggcaacccaggacagggctctgcctcttgcagaagccaattcgtttcactgaattccatgaccacagacagtccctgggaggccagccagccagctggcaaaggctgggcatgcttcttgtcccagggggcccgggcaagtagctggctagatccggcaagttcatcccctcgactcaagcaccaactcgagacatctgctcaaccgatgctgggtcagtagcatccggtttaagtactgaagggaatacacgtatgtcaggctggctgtctctaggtgagggcctcaagagacataaatctcttgtggggaggggtcctgtgtctgggcacagccagcccagagtgtctgtgcctgtgaatgccagtgtgccttgaccttggattgcctgtatctttatggtgtcactgtgtgtgtgcctgttgacatggtagggtatagtggcatgttgcagtagaaagaccgatggactggtaaacaaaagatgtaaattttggttctaaaggcctcctttcctggctctctgatccctgcaagtcagataatctctctgagcttcaggtgtttcatctgtgtaacagaaaaaaataataccagctctgctttctgtaaagtgtaagaatacaatgaaataacatatgtgaagatgctttgttaattaccacgttcagtgcaaatgtgagagattattatcgtcatagcccagcgcatcagaatgagacgttgtatatggcttaaaataatccatccagtgagcagtgttgaaatgtaggtcagatcgtagcctcagatgtttagagagaggaaccacctaatctcacaggccaccaaatgtgaaggtgctttgaaagctgcaaagaatgacataaatgcaaagtgacaattatgtttaagtctagaagggacgttttagtcctcttgtttcctaatctggaatcgtaaagatccgagaggcactggaacctcgtacacagttgtatttgtacgggtttgtagatttgtacgtgtgtctctgtttgcgtctatggactcacgtcaggcacctactctgtgacagtcattcatcaagtgcctgccttggactaaatgcatccgtctaggcattctggatgccagcatgaatcagacacccacacttccctcaaggagctgaccgttgccttgctgggtaggggaactataggagaggaagggtctttcagctcagtctaggcaggggatgggaggagggggcctaggggcagggaatccaggataggaggctggaaaagcgagtaacagtttgctgataaacctgaggggaaggtggtgtggtcagaagaacagtctatgcctaggggctgaggccggaagcagtttgctttcgcgcttggtgctgtctgttgggaccacagtgtggagaagagaccaaggcgatccagccaaatcctggggaccgccctgcacatgagctgaggagcttggctggatcctcctggcccccgggaacccccgtggcaaaggtttaagctctgcagagtggcataatcagctttgcattttggaaagctcctagagccccagtattgccacatatcttgcggcaagagcgcccgccagatgttgggctctgtgtgatagtgagggatcgctgcatatggtgggcggcgtgctgggatttgcacgaggcagggagagggggatggggaggatggagtgggagtgaagtacgaatcaggatgtgtggagcgggggaaggtagcagttctcgagtgactatcacgtgtcagcttttgctacatcacctcatttaattcttataacatcactgtgaagtagatatcatcccattttatagatgaggaaagcaagactcagggaggttaaagagcttgaggttactcctaagcaaagagcagagcgaaactcccagcccggctctgccctctccaaagcctacgtgtctggaatttccaccccctcccctctgcgctggaagtgtggacgaattcagtcccctggcttgacagatgaggaaaccaacctgggctcaaatctgttcccgcgaactgtgttactgttcttcagctgtcccatgtcaccacggatcagattcttttctttcagagtattagcaacgcctcctaattcagggctacttgcagatttgataagcatgttttacattcctttgctcaacccatcagcaaagatatggaataaaacagaccccgtgacagatgcgagaatgaaccacttgctacgcttccttggagccattgaggggcacggcccgagccatctgctcacccttcttggcgtgttagccccctccctccgcagagggaacctcaggcaggcccagagcagaagcatcgcttcccgctttgccctaagactccatcgcggaagagttggcagaagagaacatgcttttcacaacgctgctcttagggccaaatgtcaaggggaagggccaggagttgttcagacctggctctcgtggagactccaagcacgacccagaagcatgcggggcctgaatgctgggccagccgtaaagctccttgcaccaggtgtggggtacacacagcacccctgcctggcactccccgccctctctggacctgtcaggacctggagaggtggcctggcaccggggggtccaccccttcctcctgggctgggttgcacggaattgaatccaacagggaaaaaaatgtgccgagcacctacaggccctgcacacgtggtgtaggtgagagatgccagcaggactgcatatggcagaggggtggcctgtcggggcccccaaaggctttctccgcatgcccagtggaagctggtgcccatcgtgaaatgtcaagcgtctttatttttaggtcattgctgtgtggtaactgtggttccctttcactgatcagacgctctggttggctttcacatctctgattagttcagaataaaagaaagtcaaatgactccctctgtcacaaatgcagcttgttaaagaaatagtttaaagcccagaatttatgggcagtaggagtttttccagaatctgccctaggcgctggggattcagcagtaaacaaaacagacaaaggggcagaccctttgtgaagctgtcttctcaaaacctgagaagcagacaggatggacacctccctacccccattttatggatgaggaaactgaggctccgagaggctgctcctgtaactaggaaatggacaagctgggctcatgcccactttgctttttccatgacctcacatgacccctaatgattttacaagtgctgatcaagacggtgcccatttggcactggttgaatcggattagaagccccacctcagcctgaaattcttagcagttgtgtagatccaatcagaaccttcacaaatactaagctgcactggcaatacgtcctctctgtgtgatcctttcttacactcgggggtctggggtcttcagaagatggttcagaagcagcaggcctcccctcccatggggcgtgtgcccttgggcaccctgagccctcatgaaggctcccgcgagtttgctcctcctcccacagcctttctgccctcaccgcccgtctgctgtgctttcctgaaaagagcccctgaaggatctccggcctcggggctggcctctccctccacagacggcacggggctccccagtcccctggcatcctttccagatgcttcctctgctgtgctccttaaattgccctctttggtccttctccagccctcactgccgtgtcactctgcacagcttagtgacagtgctcttgaaggtcagccattctgacccctagccaagcctcctcatcctcagtatctttctcagacagctttggtctccagtgttggcagccctccccttccttgctcccacaacacaccagggtcctcttctgcacctccgagcattctctctctatctcctgtgtgagctctgcctctctccagcttgactgtggccaccacctatgctaagaccgggcacctctgttcaccctccatgtgcatgtctttggaggcctcccagaacttgagccgtgatggtctgccctgcagacatgcctcagctggaggatggatggaggggccagggatgctcttcccgctggtcttatgtctacagctggtcacagtaggtttccatttgtgtgtcccactgtcacctaaaaattaatgtggcaaaccacaaggtattttgcaatcacagaaaatgaaagttgagtaggttgttgagggccatcttactcaggtctccaggagagctgtggaccctcttctacctctgtgctgccagcactgccctgggttggcccctccttggggagggcccaaaagccatctttggctcctgacatcgtgcagggtatgaagagcagcctgtggcccatctgcagggtcaggacgtctttctccccacttccccagcatcatttctgctggggattagtcatgccagagcccagctgagtcagaagggacttgtgggtggtttgtggccaggctggagtagtgaggcaggactttctaggtttatgtctctgtgccccaggagacaagcatgtcagggcccagccgtgcacaggtgttatgtgaggggcggggagtaaaacaaacttctgttccaaactcggtgaatgcaagagatggagaggagctgagattcggtccctgagatcctcctgcaggctgacaggcatgcgcggtgccagctccacatggcaggggtgttcacagctgtacaagtcctccactttccatagttgtccatttcgagtattgcctggacttcaaatagatattgctaaatttaatatttcttttcacttgattttcttttttttttttgagacagtctcgctctgtctcccaggctagagtgcagtggcgtgatcttggctcactgcaacctctgcctcccaggttcaagcaattctcctgcctcagcttccctagtagctgagactacaggcgcgtgccaccatgcccggctaattttttgtatttttagtagagatggggtttcatcgtgttagcaggatggtctcaatctcctgacctcatgatccacctgcctcagcctcccaaagtgctaggatcataggcgtgagccaccatgcccagcgattttattttcaataaaggtgattcattaagtagatcacaaatgtaattgtgtatctgtgaacaaaagctttctcatataaataaacttttaactcaaatcctttatcagagcttgtgttatgattttatggttcggaaaatgtggtcataaagagagagagatgccttccggggggacagcagcgtctgccctgaagttccccaaaggatgtattatttatatatatatatatatatatatatatatatatatatatatatatatatatatatattatattatttagatatataaatatatatctaaatatatatctaaataatatattatttagatatctaaataatatattatttagatatctaaataatatattatttagatatatatatgggtgtgggtatttttatagagatggagtctcactatgttgcccaggctggtctcaaactcctggcctcaagggatcctcctgccttggcttctcaaagtgctgggattacaggcatgagccacggtgcctggccaaggatatattttaagtggggctctgaggggtgcctcaagcctcatcaggcaggaggggagttggtgggggcatattacacagccctggaagtgtggctcgtgggacaggaggaggctggggctggaagggaagccagggccagccccagacaggcctggaatgctacactgctgggatccacctctggcctcacaggctgtgtctgtgcctgcaggacggagaggagcaggaggagccgcgtggcaaggaggagcgccaagagcccagcaccacggcacggaaggtggggcggcctgggaggaagcgcaagcaccccccggtgagtgtcacatcctacacaccctcctgtgcacacacacaacacacacgtgcctggcctgtcgatggcagtgatgtatgtcctgcagggacctggagacatttaagaccaggtgatggggtatacccctccagctgcaggtaccccattcttcaaatcccaccctcacatttccctgttttcttatttatttatttacttttttactgagacggagtctcactctgttgcccaggctggagtgcagtggcgtgatctcggcttactgcaacctccacctcctgggttcaaacagttctcccacctcagcctcccaagtagctgtgattacaggcacgcgccaccattcccggctaatttttgtatttttagtagaggcgagatttcgccatgttggccaggctggtgtcgaactcctgacctcaagtgatccgcccacttcagcctcccaaagtgctgggattacaggcatgagccaccgcgcccggccacatttccctgttttctgcatagagaagtggaggccctgagaagccaggggacttggctggttggtcttgggcctaagacttggaccaggcccctgactcctggcctccctctggaagggaagcaagagggcctgccagaatcccaggctggactaagatctccctggactatctatgaaggcccctccctaccacactctcacccagggtctcagcccccacctggaggaagggaactgaggcctgggagtctgatcaaatgggaagggggagatgcaggctgaggagtctctgtgaggcagcaggagaaccagggccctggggaaggaagtcctgcaggcatgtaggctgcagggccagccccagcgccaggcttctgggaaccagtgccgctgaggcctgggggcagctctggagaacaagacccctgggctgtaggagcctaactggtttatgtcttaaactcagatgtggagcagtcattatttcccagcaccagagacagctggttcctttcttttaccccccttccagctgagaatggtaaacttggagcaagaaggtaagggggagtcagaggctctggatttgttactcagcccttcaaagaaatgttctcagcaggcatggagcccaggacttgctccctttgggtagagagccgggttgaaggtgactgaagtgaaatgggacagtagaggcggggggggtggtgagttcctggaggtggggggtgtgggaacctgctgtgtactgagatgcacccctgccagttctgcctgaagatttgaggcggggggcaggggggcggagtgaagtcattttactggtaagtaattttaaaccttttaatattaaagcaaacgtggatatgtaatgaatgaaattcattctggaatgaaaaattcacgtgatgttgaaaaataacacggggcttcagagaggactttctggctggcagcagactccagattcccagggcccctgcaccctcctctgcccacagggcaccttaatggagaaggtgtgggaggagagccaggccggagtcagagcacactggtgactccacatttgcagcgtgccctgcctctctcctgaggcttggcaacgtgcaatatgctaagcaaactccccctgtccccgtccagtttctgaggacaagagccaccacctgtagcaaataaagacccagcaaccctttgactcatctttgtgagtctctggaatcagagggtagccacatcgctgagaggtggagtgaagcactcgggtgaaaaggtacaaggaagtcagggacaggagtgtggggacatcacctagacaatgacagagaagaggggcacagccgagtgaggggagaggggccggcagtcctacatcccctggcctgaagcacgctccagggcagaaggaaaaacactgtctttggggtccaagagacctgagttcaaattctggctccaccactgaccacctgtgtaaccttgaactgctgctgcctgaacctcaggttccccttctaaaaatagaggagaaaaggatgcatttctccttgcccctgtgagaacgaaatggtgcaagcaccaaggagcctcagcaaaggtcgggcctgcccccgcctggccaaacctttcctcttcaggaggccacggcaaccgtagtttgacagaagagcagcaccttgatttaatgcttcccagcatgtgtccttgagcaagtcacctaacctctctgggctgcttcctcattgggaaaatatggctgccagtaaaacctgccctgtccacctcctggggcacttggcaaacagcaaaagagtccaaatgtgcaggctgggccaggcgcagtggctcatgcctgtaatcccagcaatttaggaagccaaggtgggcggatcacctgaggtcaggagtttgagaccagcctggccaacatggtgaaaccttgtctctacaaaaatacaaaaattagccgggcatgatggcgggtgcctgtaatcccagttactcgggaggctgaggcaagagaatcgcttgaacccggaaggggaaggttgcagtgagccaagattgtgccactgcactccagcctgggcaacagagcgagactctgtctcaaaaaaaaaaaaaaaaaaaaacaatgcagagctggctgtgtaaaaaacctgttccactgcagggcccagtgtccaccaggctggggtgcaggcctatggggtgggggcccagcatcagcctctcagcagccctgggaggcggggcgcatcccgtgcccctcgtggtctggatgtgttctagcccaagtcctaggttacacctgccgtcgcctggcctctcaggagaggcccagggtgaggaggagcatggtaaaggtgaagctgattgggaagtcagctgttgggaaagcaactccttgcacattggaggaaccgagaaagactgaccccgaggacagcagccagcatggcccttcctgggagcccatgttgggggattcctgctgcagccaaggctcagcccttgtggtcgcaggtgctggtcctggcctcttcccctcccatgcaggagcacaggagagatggcttctgaggacctgttgcagctgtggccctgggaatagatttgccagggagctttaaagcagctgagtgtgtcatccagctaagcctggggaaggagcttggctcaggtcctgacaggtgtgacagggatggggactgggaagtaagagatgaaaccctggctggaggctgtgagcttccacagccagcgctggacagggagggtccagatatacccactagtgccctcaccaggtcccacccccaagcccaagaaatcctgggctctctcctccttttgcccccaaggactgtctgtcttggccttcaacaggcatctgtccctgggtgccttctgccccctggcattgccctcacccaaaccagactccacctgccccttgcatgcccaggccagtgtgctcccttcacgacaaacactttccacttcctgagcactgaccatgtgcgggaagccaccagaggaagatgccttctatttcagtcaagtgtgctggagagaggaggccacacataatcacagtaaatgtagcaccggcacgtccttcttcaggaaccccccgggactccattttttaggggacaagatctgaattccagcccctcaccatctgaccactcctttccctgctatgcctgatgccacccctttggccacagaaacctcaccttctcactgctccccaaacacactagccagccattcctcctgcccgccccttacacagttccacagcctgccttctctccgcctgccccagcaccacagcccggtagaacctagcctgaaaatgaagcccagttcagccactgtgacccacactggcctttcccttctccaactgtctccaaagttaataaaaatgaactgataaagacaagttccaagcccaccgatcacacacatgggactgcagtggtctgcagacctcactttgagaagcatttgttgtcacctgtcggtacagaactgagtataactattcagaagcttttatgtgtgtgtgacaatgttgccacatccacgtgctgtgattttatattttacaaccgtatcatttcttggtgcattgagaatttaaaaatctggaaccaaagcttgagctttcatccctgacagtttgaaaatgcaccgccattgcatagtcgctgagctgtgccacactgagtttgcctgcctcactgaggacagagaccagcagtaaaggctcatggttatgcagcatgttactgcctacaaaggcgttttacaggggttaccttatttgatgctgacaaacctgcgtgaggtagttggggaccgctttcattatccccacattcagaagaagagactgaggttcagagaagatgatcaggacttggacttcacacctcccaactgcaaagcctatggtgctctttcctccttatcactgcatccgtgcagtttggctactgggtacctacccaggggttctctgtcagttaatatgtgaattcagggctgctggaaaaagtgtgtggaactggtccaaaaagcatacaaagaaaatggaactgaagagagttattgacacaaataccagggagcctgtgtgtaagtgccgaaggctgcagggggctgagggcaaagaggtgcgcctgcttaaaatcggcaacggcctagttgtctgcagcactggccagagagccaggatgctgcagtcagagccggcaacaggaaacaggaagtcagctgcagggcagggcggggcttaggaagggagctggcacctgggccagggcctgcgggctggccagtgcccatgatagggaggcgggggctggtgcgtggagctgagcccgtgtgtgggtgtgaggtggggaggaaggggcagcctctaaggatgttgcagggtgacaagtgtgggtgtctgaggctggttcctgcctggttgccagcccagacagtcctgcagaggcctttgtccttcatgggtggttccggttggagccctgaagggagagtttctgcctttgcccacaaggccctggggggtgagtggccctgtggggctccatcccctatttactagcgatgcgtatttattcattgacgatttatacccaccaacttcctccagggttatttttgctcagagggagcactctgaggtcacctcctgctaagaataacccagaatgggagggaggaggaggagggggctgggcgctggtgctgagctcagctgagcccaagctggtgttagggctgaccctccaacaccgcaggagtgagccagtccaagagggcaaactgccccacttcagagcagatgacttggggtaacctaaatggggaagtcagggaaccattctgctgcaggcaaaagtcagctaggtacagcttatggcagctcttggaggtttgcagcactggctagctttccagcctgataggacctttgattcttctccaagttaagacagagctcagcagccctgcttgttttcagatcagagccgctcctgggctaaccctccggacctcggctgggtgatatggtgcccctaccttttatgcatataacttcctgacatcgtgtctcccactcctgggctgcagcccttggcccacccctagaggtggcttttcttcctgcgagcctgcatcagtacacgctgctgcccactctgtctcctcatgttttggaaggcatgaggaagacaggccgacacactgcttgtgaggtagagcctatggttatgaaccttgcagctccacccacccactccccgacctgagcggtgaaatcaacgcccgctactggagtgctgcatggaagggcctagcccatggtggggacttaagtgcagtgggactcctaaggatgccggggaagccagggaagatggaggaggtggggcttgacctgggccttagaagggaggtgacatttggagaagtcaaggggaaagtgagaggcacccccgaccccagctgagctgggtgtggaggaaggaaggcatgcagggcagggtgagtgtggggaggcccaaaggcaggggccatgagcacacaggcacaggcctggctgaggggactagggattcattgaaaaatgtatacggggctgggtgcaatggctcacacctgtaatcccaccactttgagaggctgaggcaggtggatcacttgaggccaggaattcgagaccagcctggccaacatggcaaaaccccatctctactaaaaatagaaaaaagccgaatgtggtggcacatacctgtggtcccagctgcccaggaggctgaggcacgagaatcgcttgaacctgggcaggcagaggttgcagtgagccgagattgtgccactgcactccagcctgggctacagagggagactctgtctcaaaaaaataaatttttatatatatatataataaatagtagctgggtatggtggtacacctgtggtcgcagctacttgggaggctaaggcaggaggatctcttgaccccgggaggttgaggctgcagtgagccataattgtgtcactgcactccagctgggtgacagagcaaaaccctgtctcaaagaaagaagaaaaatcttctcaatcttgattggaaaggtagtttgcaggcagcctgaggggcttttactctttatcctctctgaaaaatgtgttatctggaaggttgtgaggaggcggatatgacgtgatgggagtcgtgtttgagaaattggctctggcacccatgagcatggcgttcatccctgagcatgagcacatgctgggagaggggagggggcaggggcgccagcaaagtcccagggcctgtggggggtggcagtggcggggcagaattggccaagcctatgctgctggccctgggaacgctggagaggaaggggtgaaaggaagccctagcaatggcacaacagggacagcatcagcgttgttgtcagagacaaggcttctggaagggagcagatggggaaggggcccctgtcaaggccaccttacatagctggtcttacttggggagcatttaagtagaatctcagaatctcctttttttttttttccaaaaataatccctctgtttattttcatctctccacatcccagggccaccttcagcgagtcattcattcccacaggtcctggccttggtggccttcctggggccccatgagcttttctagggcccgggctccacctgcattgttcctcctgttgcaggtacgcgccggcacacccattggaggagagctgttgacatgggctttctttcatcatccccacctagagaattttgtacattttggttctcctacctcaagaaagacataagcgagttggaaaagctccagagaagggcactaaattgatcaaggggaaggcaaggctgccaagagaggacaggctaaagagattaggactccccagtctgcagagacaaaggcagaggatgtgattaaggctatgaaatcatgtcgggtgcggcgggctgagcacagcacagctggggggcagagggaggacacccattagaaatttcagaaagataaatgaagcacagaaaagatagcaccattttccatggtgggttcccttcttaccaaacctgtcaccctaggattggcagaaattgaaaacagaagcaacttcaaaagagatttacttaacgtatgggatctctcatacgtaatggcttttttgtttttgtttttgtttttgtttttgagacagagtctcactctgttgcccaggccggagtgcagtggtgcgatctcggctcactgcaacctttgcctcccgggttcaaacaattctcctgtctcagttttctgagtagctgggattacaggcgtgcaccaccatgcctggctaatttttttttttaagggtcgaagggatttattgaaaatgaaagtacactacacaatgtgagagcaggcctgagcatagggggctcaaaggccattttttttgtatttttagtagagatggggtttcaccatgttggccaggctggtctcgaactcccaacctcagatgatccgcccgcctcggcctcccaaagtgctgggattacaggcgtgagccactgaacccagccagcataatggctttttaaagggagcctccagctcactctgaaatcctttgaggttgacttcaaagagcacaaccaggcccttttccaggtggaccagtgtccccgctggaaacagaaccctgagtgggccggccactcaccacgcatggtcattctggcatccatttgccatggcttgtgacggcctagccaggccatggactgagtgacctctaaggctttgcagagcccagagttctctcctcagacacacgggtggagagatctctggggagaagggagacaggcagctcccagcagatgtggtaaggggaatggtaggacctggagggggtgcccaggctgggaccagagtttccagagtcggccctctgtggcctctggtcccgccatccctgaccccactggctgcgcttttagccaccccacagggaaaagggaaattggaggagtcagggtcctagctccatagcgttggagcttgctccatccaccccaggaaggccgagcaagggggcatctggggaccccctggcccctcctggagtgggcatggagcaggcatctctggctctccctaccacaggccacttccagctgctatcagatctctggtgagggccgccaggggaaagggggctgccggaagggcgggggcgggcagtcatggccccgtgccaatgcttcgggggcagagctgccctgcttacgtggacatgcagctgtttcctgaaactagagtcaacctggaaaaattcaggctggttgaggggtgatgggcctgcagagctgaggaactggaaggagcgaggagttgcggtgggagtggaggggctcactggcgtgtttgtgttggcatcacgcagcttccttgcacccctctgtcctgtggctggcagtgggtgtctgcaggcgtgggggtgcctccttctcaagtctgtgcacgtgacggtgaagagtccgtggctggcctgatgccagggttcccggttggcatggaatggatctcacagaggcattaaaagcaccatggcaggcccggccctctgggtgaccaaggtgaggtcgcccctgcatctgctgggctttgggggagaaggcaagaggagctcccagtgggaaaggaagaggcaggggaggagggagaatggcatctacccaccccccacccccacaggatcccccttccccggtgatcgctgcaggtgggctgcagcctggggacagggcttcttgccccaggtgccagggcctcatctcccctgtgccatgaccttcacctctcctcctcctggattttagtttttctgtgtaaataactatagtaaagcaacacttaaaaaccacttctggccgggcgtggtggctcacgcctgtaatctcagtactttgggaggccgaggtgggtggattacctgaggttgggagttcgagaccagcatggccaacatggcgaaaccccatctctactaaaaatacaaaaattagctggatgtggtggcacacgcctgtaatcccagctactagttgggactgaggcaggagaatcgcttgaacccgggaggcagacgttgtaatgagacgagatcacaccattgcactccagcctggagaacagagtgagactgcgtctcaaaaaaaaaaaaaaaaaatcacttccataaaattagctggatgtggtggcacatgccagtggtcccagctccttgggaggctgagataggaaaatcgttgaatttgaggctgcagggagctatggtcacacccctgcactccagcctgggcagcagagtgagaccttgtctcaaaaaaaaaattttttttaattacttccataaaaataaaaagttaggtgtggtggcaggcacctgtagtccctggtaaaactgaggcgggaagattgcttgagcccaggaattcagggccacagtgagccgtgatcgtgccaccgcactccaacctgagtgacaaagggatatcctgtctcttaaaaaaaagaaagaaaaaatcacctccccatattgggagtttcagacattgccccaccctgggacgcaaggctttgcctggagtgaaggaggggcaggaggtctgggtctggcccagactttgggcaaagggggaagaggaggcggcggcagggctggggaattggttccggctgggcaggccacagcagagggctcctccttgccttgcctctgtcttttgcttgaattgagcgctgctcaggggagggccagcagcctctgcccggcctttcttgggcactgcactgccacctctgccttctccaaaccctgggggcatttgtgagcttgcgcttttctgagactcaacccagagcgggagtcggccttcaaatgcctcgcctgtacctgagccatcctggaagctttactgatcagaggcgtgtgacccaaggcaggcctcagaaaagcgagtatcgctccagctcccctaggatccctgtgaaaattacatttattaattttataagcatatgtatgcccagtcctgtgtgggatgctagagagccataggtggagaggcctacaaagttaaataagattggccgggtgcggtggctcacgcctgtaatcccagcactttgggaggctgaggcggatggatcacctgggatcaggagtttgagaccagcctggccaacatggagaaaccccatctctaaaaatacaaaaattagccaggtgtggtggcaggcacctgtaatcccagctacttgggaggctgaggcaggagagtcgcttgaatccgggaggtggaggttgcagtgagccgagatcgcgccactgcactcgcctgggcaacagagcgagactcggtctcaaaaaaaaaaaaaaaagttaaataaggcaaggctcacagtcgaggagggaggccacagtaaacagataattagattcagaggtatgaattgtaaggagattgggtgagaaagggctttgtaaacaaacgtggcatgcattggctgggacaggagtgacagctgcggtgggttcacccccacccttcagggcaaggctgggccagcagctgtccacacctgccaactacagggggctgaggggtccagatccttccatttaaaggagcattcctttaaaatgctccttagaagacagaaagtagaagagtggtgactgggggagaggcaactgggaagttagtgttgaatggagacagtttccgtttgggatcgtggaaaagttctggagatggatgggggtaaaggttgtataaccatgagagtgtacttaaagtatgcttgaaaatggttaaaatggtaaatgttatgtatgttttaccccaggtttttagaagtttaaaaaagtgtttctaggccgggcacagtggcttacgcctgtaatcccagcactttgggaggctgaggtgggtggatcatgaagtcagaagttcaagaccagcctggccaagatggtgaaatcccatctctactaaaaatacaaaagttagccaggcatggtggcagtcagctgagataacaccactgcactccagcctggacaacagagcgagactccgtctcaaaaaaaaaagtgagcgatcttggctcactgcaagctctgcctcctaggttcacaccattctcctgctgcctccccagcagctgggactacaggcgcctgctaccacgcctggcgaattttttgtatttttagtagattcggggtttcaccatgttagccaggatggtctcaatctgctgacctcatgatccacccgcctcagccgcccaaagtgctgggattacaggcgtaagccaccatgcctggccaaaaaaagtgtttcttaagccaggcatggtggctcatgcctgtaatctcagcactttgggaggctgaggtgggtggatcacctgaggtcaggagtttgaatccagcctggacaacatggtgaaaccccatctttaccaaaaatacaaaaagttagccaagtgtaatagcagacacctgtaatcccagctacttgggaggctgaggcaggagaatcgcttgaacccaggaggtggaggttgtagtgagccgagattgcaccactgtgctccagactgggcaacaagagcgaaactccatctcaaaaaaaaaaaagtgttcctttgataaagacagtccctgtccttgcccctaccctcagcccagggtttttcaaagacattattgccattttgtctggactaaatctctgttgggggcgggggtgtcctctgtctggtggggtgtttagcagcttccctagcctctactcactagatgccagcacctcaccctaaccttgtggcagccaaaaatgtcttcacacacatgccaaaatgtcctggtggggagttagcaaaatcgccccagttgagaactacggccttaacctgcctcaaaaagctgctcacaggagaggactgaggaaaagccggaggcaaggtgggggttctgcccagaaggaaagcgaagattggcaaactcggagggaccccaggaagtggtgggcaggatttgaagacccaaagtgtggtataccgggtggggataggtggacagtgggtgataggaccaagctgtactgaaatctagaatgatactagattcacaaccctcctgtggcccccatctggccccccacgggaggagaagtgatgggtagttactgcggcttttcccattctgaaattgtcacctgcagctgcacctgctggtggtgccttctagaatggtcggcacccccaacccagccctctcccagataatgggcaacatgagtatctcgggggtgtgctgtgtctctttcaagatgactgtcaaaagcaaacaaaagcagattgtttaacagacatggcagcaaagctgaaactccctctagcttgagtgcaggaggttctcacttttagcctcgtctttgccattcacgaatcaattgtgaatattgtctgagcacctgtcaggtgccccactccctgctaagtctagccggatcgagcaaagtctctgccctccagatcgagcaaagtctctgccctccagaggtcaacaagctgtggagacaggggaaaggaggggaggagagtggctgggaggaggacatggagttgggggcagaagaggccaggcctggctggggtgcccctccctcctgggcttccaggctgaggtttctgcccttctcaccagggatggctccttcagtgagcacccagctcttccccagagacttggacagttgcttcaggccatttgactgggacctttttccttcctctggatggttttgtcctgctggtcaccctgagccccagagagccccattgaggggccacacttagcttgagggagttcttgatgggtaggatgaatcaagggttgagcgtggcagaagtcattgccctcccccccaaatcccagaactttggctgaatcatctcatccagaacctgagagagcaggtgagcaggaggggatggttgggcagaggatggtgtggaccagatgcgggagtggggatttcagcgggtgagctaacccggggctggaaatgtgcaacatgccccgctcgcccatcatctgcccagcatgcccggctcccacctggctttgggggcatctctgggagaatggcgcatctggtgctgttgcagactggggtccgcgggcaaggccagggcagggcttactcttgtgcatgaaggactgggttggtcgggagcctggggctgtgttgggcctcagagccggccctcataggtctctatgctacggagccagcagtcaacaggaagtgagtcccagcatgagaggaggccatgtggtcccaggcaggaagtgagtgacagtggagttgcctccagcagctttgcggggctcagagcctgccccaatctgaggtgtctgcagggcagcaaatgatgagaagaaaggaagacgcagccatgaaaaagtctggctctgacctaagcttcttagctcaagttagccaggcaggaccccacgcatacctcttatggtagtgccatgttgggggctttggggtacctggaacagctggatcccagaaggtggctgcagtgcaggggtacactccacttttcaggctgctggggctcatgactgagccttgaagggtgacagacagggtttacaccagggaggaccattctaggctggaaatgccctctttgcttaagcagggagggaggagaggtgttctgagttctggggagggtcctgacacacaggatggaggcaggggtctgccgttccactttccttcccggatttggccttcctggctctgctggcatcagcccaagcccccaagcacagtggaggacttctcgcttttaccagtcacctcctcttcctctcgttgcagccccctgcctccaactgctgaggagtacacacatgcagctttctgtgggtgcttccctcctggaagcaggcctgcccagctgccccgcacagcaggaaaggagcttggcaggccctgcagttccttctgctccctctccggctgctccctgtgcccgggtccccatccagggaggaaagcatacctgagaagactctggttttgtttttgtttttgttttcccaaggcccttgtccctaattgccacctctgggcgttccttgccaaataacagtgggttgagagttcaggtcctagaccgttagagcaaaagcagccttggaaatagggctttgcaggggaggggctggggacccagtgctgtctcaggctgtgcacttgagtggtgggaaactctggagggaatttggcagtatctctgcacatttagctggacaggccctttcacccggcctgaccacttctggaactccgtcccatggaaacacgcagctgtacagagctgtaagtgcaagggtgttcactgcagtgaaaagcaaatcagcccaaatgcccaccatcagggaacggcatgcatacattttggagcatccagatccatctgcactgggatggagggatgcccactctgcttgttaagtgaaaaagcaagttgcagaacattacgactagtatgatacccttttggaaaaaaacatttctggatctgaatgtgtatatgaatacatatgtataaacatgtaacttacacatgattgtcaatgcataggaaaaaatctggaaaggatgctcactgaactgttaataatgggtaccttaggggagagattttgggggtagggagctgaaataggagctttaaccttttagcattatttttttttttttgtatagtctttttttttttttttttttttagatggagtctcactctgttgcccaggctggagtgcagtggagcagtttcagctcactgcaacctctacctcctggattcaagtgattctcctgcctcagcctcccaaatagctgagatgacaggcatgcaccaccacacccagctaatttttagtagaaacagggttttgccatgttggccaggctggtctcaaactcctgacctcaggtgatatgtgagggagcctgcctcagcctcccaaagtgctaggattataggcgtaagccaccacgcctggctacagtttgatttttttatgatatatgtgactgacttttataagtagaaaaaaaaagacaagaaagacaaaatctccattggtctagaccagtcatctccacctgacaggtggggaaactgagatgctgagagcagtgccttccttatctgaggcttgccgtgctgatgctgtccctgcctttctactgggtaggtgttctgcatacggagccagcgaggcagagttgctgagtgcagcctggtgcctgtgggtgtggcagagtgccgagccatggggacccctgcctgttcctgtcccacactggacacctccattcttcttgaggtgtcctggcccacttgcctctggatggctgaggactgaatatatatacacagcagagcacacagcaggcacccggctctcctgctcttgctttgtccttgcaaagcctgtgacctggagcaaatcacaaaattccagagagcctcaggttcctcacctgcttcccagggaggctgagaaactctgaggaggtagtaagtgaggagctttgtccactgcgcagtgacacacacagacagccaggattattctttatttgatttttattacctggaaccttagcgagttcagttcttagactctaggggataaagaaatgatttcccttgaagggagaatgagagaccccagtgctcaggaagagttgttgcagagcctgaaaactgtttgccagagccttggctcttctgggtctgagtgcctgaaagaatctggggcggcccaggccaggggagaaggctacgctaggctatgagcctacagaatggttttttgggggtcctccttcgactctcatgcctcaagagaccaagaggaaagctgggagggcactgaccacagaagtcagaccagcctgagtcccagacttgatctggtggcactggaatcttctaagggagaggggggtcttattggattatgggtggcacaaggagcttttttttttttttttttttttgaggcggagtcttgctctgtcgcaaggctggagtgcaatggcgtgatctcggctcaccgcaaactctgcctcccaggttcaagcggttctcctgcctcagcctcccgagtacctgggattacgggcatgcaccaccatccccaactaactttgtatttttagtagagatggggtttctccatgttggccaggctgctcttaaactcccgacctcaagtgattcacctgcctcagcctcccaaagtgctgggattacaggtgtgagccaccacgcctggccggagcatttcttttttaacaggggctgcagagaaggcttggacgtcctatgtaacctcagtgagtggcggtgggatgggggagccgatcccttgagaagtgcaaccaggctggcaaacctgcttggattcttttcctgtttctgaagctggagtccacagactcgtgatttcaaggggtcaagcccaggaatcctttgatgttgaaagcaaaattgtgaatgtatctgtttgcatgaaggtttatatgaacacagtttctggacagaaagtgcataacattctctagaatttcagagcggtcaatgatccaaaacaggctaagcccactgatctaaccctcctcttgtgtatctttcttacatttgcaggtggaaagcggtgacacgccaaaggaccctgcggtgatctccaagtccccatccatggcccaggactcaggcgcctcagagctattacccaatggggacttggagaagcggagtgagccccagccagaggaggggagccctgctggggggcagaagggcggggccccagcagagggagagggtgcagctgagaccctgcctgaagcctcaagagcagtggaaaatggctgctgcacccccaaggagggccgaggagcccctgcagaagcgggtgagtcctcagcaccaggggcagcctcttctgggcccaccagcataccctgagagtcagggacttggctctccagcaggtcccaggaaggatggtctgggtcgtggctaaaggtctgcttgccaaggctatggcctggaggctactggctggatgcagcctgcgcatatgttttatttggcccatagagtgttttaaacatttaaaaaattagttgccagtatttaaaaatcaaaaaatttcacataaaaatctggagttttggcttctcatgaaaaaaaaaaaagctagatctggcaacagcgggctttcataacgccaacgattgctagactgggataatggcggtccctccatcgccttctgtggctggttgtgggccttagttttctgcagctctacctggcctgcttactctcccacgtgccatgcagttcctgggggttgctgtatttgtagcccctggcctgggcactcaagggcagcagataccctgtttgcctccctgagtgcagaggtcctgagcccaccctagttgggctgactcaactggaaatttggttgtgacagtggcgtggggagagggctgggtgattgtattctgtgtactgcccagcccaggcctcttcatctggggactttttggcctaaccctggaagcctggaaagttgcccacttttctctttcaggttaagccagcaatttcagggccaaccgagctgtaaacatgttagtaatgaggacaactagcatttgtacagggcttcacagtttacaaagcgctttctcatacattatcacatttgatcctcccagggccctgccaggttgttttgcatatgtgcattttaatttcaaaaagtcttccttccaagcgtgtatgatgaaatgagtaaattgattaattggcgtaacttattttgcatggatccaacctaatgttcatgcaggatagagaacatttccagaatacaaatttccaaacttattaagaagcttttattcatttattattcgacaaatatgtatgatgctcccactatgtgcagaacactacagagggaatctgtattagttgttttatttactcctctaacaatcttattcaagagatatgattatcctcatttcaggagaaaaatattgaggcttaaaacaatgatgtgacttgctcatggagccccaaccttaagtggcagatccagggctcattcagtcctggtcttgtgcctttctactattttccgctgtcctggaatgggacttggtgcggagacgggtcctgaattgtctaggcctcttgcacatattctgatacttcccgagagtgggaagggcctgaggggagtgaaacagatgaggaaagggagaagacaccatccttcccattaacaatgccaggtgtgtgagagaacccatcagccctgcccttccaaatgtggtgcttcccatgggctgactgcagttgacttcgcttcccaggaccccaccatgactcctgccgagctgctacccagggtcacggcattccttcctgccctgaagcatggagccatagccccaaagctgttctctggccttgagggtttgttttcactttgggatttccctacttccatttctagctgttctcaagggctcctgcatcgatcagtcaacaggtgtttcttaaaacacccattcagggtgtgctaggatccataccagggactggggaaactattatgaacaaaaacctgcttcttgccctcaaggacctcacagtcagctggagagacagacattaatgagaaatccacccttaaaaagatgagattacacatggagataagcgctctaagggaagtgaaacatgtccaggggaactgcaacgaagaacctgagttggcctgggctgtccagcgcgagctgaagggcgaagggagtccactgggtgaggggtagagggagagagtgagaacagggaagaaggctcccaggtgggagggagcagggcacccagggaactgatagatgtcacaaggctagagtgcagagagcaaaggagaagggtgtggaaagtgctggggcagacaggccaggccttcaaaggtggctgccggggtggggggtgggggggcggggggggggggggggggggggcggggagtgggcagtgtgtgtgatgtaatcagctttgcaatttgaaaagctcatgtcatctggatcctgggatggaatggaggagctgggaagcaggatgacatcggaggggctgatgagcaggatggcagcagagatgaagggaggggacaaatgccaggaacatgagaggtgagggagagatgctgtcaaggatgattcctgggtctgggactttcagacaggtggatcttccttagaatcttagtgctgagtgtggtgggcaaaaactctttaagtctccttgacctccaaaatttggccttgaggctgggcacagtggctcatgctggtaatcctagcactttgggaggcccaggcgggcagatgacttgaggtcaggagttcgagaccagccgggccaacacagtgaaaccttgtctctactaaaaatacaaaaaaaaattagtcgagcttggtggtgcatgcctgtagtcgcagctactccggagtctgagacaggagaatcacttaaacccgggaggtggaggttgcagtaagccaagattgtgccactgcactccagcctgggcaatagagtgagactccatctcaaaaaaatacaaaaaaaaaaaacaaactttggccttggtacactcctgtgtggtcccagctatccaggaagtatagattctggcagggatcagagctggtaggatccctgaaggccactgcactgcctggaagctgaaattggtgagatgttacctcgcggggtgggcagtggcctaggctctgccaatatgcaacggacagtggcttaatcagggtgtggaggctcggtcacggttccagcagtcagctgacatagaacacatgctcagctggttgattcagatgaggaaggagactaaggccccggagaggatgtggctcggccgtggtctcctttcagttccccttattccaggtctcttttcaggggatgctctcctggaacccctttcattagctcctgtacagcaaaaacagactttttaaggcagcgtttcttgtagcctgagcatgtgctgaaagtacagccaggagaaagaatcaggaagacgggagatgatgagatgagtgatagggacaggagccaacacccgacaggcctgtgcttgtcttgggtctgttcctgcccccgccagcattaatgccataatgatgatgattcaggtggcagtggcgatgtggctttcccttattgagtattgactgtattgggcattctctctcctcgctactcacagtggtccatagaccagcagtgttggcagcacccaggaatttagaaatgcagaattccaggctccactgaagacctgctggatcagaatctgcattttaaagagggcctcatgcttcccatgtatatgaaagtttcagaagctctgctgtgtattatgccccatgtgtgatcacgggaggaagatttttttttttttttgagacagcgtctcattcactctgtcgctcaggctggagtgcagtggcacaatcttggcttactgcaacctccacctcccaggttgaagcgattctcctgcctcagcctccggagtagctgggattacaggcgccagccaccatacctggttaatttttgtaattttagtagagacagggtttcgccatgttggccaggctggtcgtggactcctgatctcaagtgatctgcccaccttggccttccaaagtgctgagattacaggcatgagccactgcactcagcctggaagactcttattatcctcatttttcagatggggagactgaagcttcagaaaggttaaattacttacccaagattatgcaactggtgagagaccggattagggtcagcacaaaacccctctctactctgagcatagggccccttttcaggccagtgactgccctctgaggtaaacctggctacagcctggtcatggagatttgagttcattttaaagagaacttgggtggcctctggctgagtatagctcagactcgaaggcgagtgttagaagcaccctggcctcccctgcccccaagtcctgagatgcactagggtcatgttcgggcctgtcagggccacactggaaggtcacaaccacctggccctggcggtgaccctgggcctgggccaggagcagttgggctgcataggccgtactgagagagcagctgaccctccctgactcacgacaagtgccgcattccgaggcggcccggccaggctggaaagcgtgtgtctgtttgtgtgtgtgtgtgtgtgtgtgtgtgtgtgtgtgtgtgtgtgatcactcaagtgggcatgcgcagagtctgtcagggagaaaattccagaaagaagccagttggaaactgcatagggaaaaatcgttctgttttggggagcttggggggctgggaaattaggaagggggtcacattgagaaataacagtagtggtgcagcggagagggagcttgccggggcatcaggacccctgaaaagctcatctcagctccggccttaagtcactccaccccccaggtctcagctttctgcaaaatttaagtgctgaacaagtactcaatgatctctgcaaagcctttcaaccctgattttctaatattctaatgaataaataattatccgtaaaagtaattaaatgccatggagggtcccaagtaggaaacgtttgaggttctaaagcgggctggggagaaaatgcagtcggaagccccaagtccaggtccgagagccagcccgggggtcctccactccccgccctagccgcagggctgacacagtggttcccagcgccaccgcgagccccggagccccgccgcgtcagggtccgccgggaccgccaggccgcccccaggccgccacctgatcgcgagcaggcgccccctgctgggagcccggggcctcaccgggcagagcaacgaggtctgggaggagggggaagccctggcctgggaacggggaggccccggacaggctggagggggccccgcgaaaaaagtggggagctggctgtggtgggagagaggacggaaaggaaacagggaggcagagccagacaagatgggtgagacagcccttaaaaggccggtcacgaacaaagcgctggcgagtgcgcgcccgcccacgcgcacaggtgcccgcgacaagacgccccgtccccgcccacgcggcccccgcgggctgagcccggcgccaggcccgcacccacggtggccctcctgcctccctccccctggtgctcccgggcctagctagcgggagtcgctgtcaccagggacagaaccacggaggacagcgctgtcctgggcgcccggggtcagcccaaaaccagtccaggacccccctgtcacgagggaagggagtggcctcccgggctgaggacccgcggcgtgaacactgtggctggcttccgcttcacagccaggagatgaagtcggggctgttttttccgtttcaggctctttgtctccccccaccccaagctaccatgagccagccttagtgaccttcctgcagtgggcccaggcccgatacgctgtcggttcccgacaaagaagctcaggggcccaggtggaaggagggctcacttccccacctccagcaagaagctatgggaggcagaatcagccagccccgcagcctccggggcgctgggcctggaaggggtgcctggaaagggtggtgaggacctggtggggagtgcagggggatgcctgggaggagcgcagctcccctcatgctgggggcttggagaagcacagggagagggcaaggtctcaatagggaaattgagacttccctgccaggacctggaatcagggcccagtagaggaaatgaatccttagggaaggagaaccacactaacatgtattgagcacctacagtatgccaggccccacagtaggcacttaatgctcaccataacctaatgattttagaacatttatctaccttgattcagtgggaaaacaggccaggagaggttacagaggtcacactggaatccaaactcaagtcttctagattaaaggctgagctcaggggcctgagcatggggcagggagtggagggacggagaatgagattagtaatagaatcataatatttggacctgcaggcggaccttggaaatcgcatccagcatccttattttccagatgaggaaactgagtctcgtagagaggaagttgcttcaccggggtcttgttccagttggcccggtacccaccgccccccagtacatgcccttatgcccagaaggcctctgcaaacactcccttgcagggccagggaggccgctcaggctggccctctggcccaggccttcctgcaccccctcctccttccgcaccccctctgccttcctgctcctcctttggggaaggaggtctcttgactgggagcagcagaatgggggtatttttagtccccttctgtgtacctgagacagagttgacaggccagaaacccagctctgaatttcctcgtgttccctcttgcctgggcctcaaggcctgcccctgcccgagttctttctctgccctaggccctgctgggtcctcagggtcagcactgtgcctggcatgtggtgggccatcatatttaacacatgaacagctaaacggccagaggacccccatcccctgtggcagggaccccaggcacaaggtggggcctgtgagccactccagtaattctgccgaccaacgaactggtccctttgttcttccctctccacaggcaaagaacagaaggagaccaacatcgaatccatgaaaatggaggcaagtgttccacccccaggggctctgtggatcctgattctagaagaaggacacgggtggcgagtgtgtgtgagggggcggagggtgggcccctcctccttctttacacatccctctgtgggaaggagaggaagtgggcgtggaggttggaagtcccccaacaaggcagccggctcatccccctccagaggccagacgcctcccttcgtggcctgtggccgtgtccatgtgcccccccacccccgccacacatgcccctcgctcctccagcccacacggggcctgcccagcactcccaggggtgccctctctggccaggagccagtgtccacattgtgtttgaggcgagtgcctccttggtgggtccgtcagtgcccaccctaatgccctaatgtctgtctctctgtcctagggctcccggggccggctgcggggtggcttgggctgggagtccagcctccgtcagcggcccatgccgaggctcaccttccaggcgggggacccctactacatcagcaagcgcaagcgggacgagtggctggcacgctggaaaagggaggtgaggcgccttctggcctgggccccagcccgtcctgcagaactggaaaaccagaagtgatgggcctcagtttccccttcaggctaacccttagaacttactgggagcctcttaatctctagtcagtgatgactggttcatctgctccttcagcagatgcttattgaacacttactgtatacctggctgtgtactagaccctgggcgtatacggttcctgctctcatggagttgacattctgatgggggagacaggcagaacataaagaaacaaggggctgaaatagaagatagcagaggcctgctttagttggggtggtcaagacaggcttcttggaggaggtggcatttcagttaaggtctgaaggaaccgaagagctggctctgtgaggagtggggtcagggagagtgttctaggcagaggaaacagcaccagcaaggccttgacttgtttggcaaactgtatgccagggtgaaatggcaaaggagaaagggccagatgcagccagagaggcaggcggggctccacacatcagttggagacctgcagagtctgcccaaaagctggcttacttctgacaatactgggcagccatagaaggtttctgtgcacaggaaggatgtgatgtggatttgagaggcagcagtggagacagagaagagctttggggtgtattttggagctagaatagctagggcttgctgatggaccggcagggaggggaactggtggactcaaggaggactcacaggggtctggcctgaacacctggtgatggttgtgccatttgctcagatgggaagacccaggggaggatgagtttgggacaggtgggaattgagggctccgtgtgagatgccaggtgcctggagtctgggctgtagggaagtacgggcgacagaggtgggatttgagagcagaaccctggcatttaaatccatgggaacttaagggctcagcaaggggagaaggaggagagacgaagtctcagaacatgtccatgaaaaccccgacatttctgggccacatggagaggaggagtggcaggcagtagggactgagggagaaagcagtacagagcggtgtctggggaagcacggggttttcccagagggtggctgcccagccctagggaaagctgaattcactgagacatgcccatggcgttggacaacctggaaaggagctggtgactttatagagaagcttctgtgggggtcggggaggtgggaacagcccgtggagggcttcagccatgcagagaggtgagaaaatggaggctgaaagactgaggagggaaatcaactcgccacgcacaatttttgagctgtcttgtatgtttgattagtagagaactgggtacaaagagaagtgggtggtgacctagctgcacaggaaaagagaggaaactgccaccacgtggggcacttcacgtgaactcagctctcatttcgtctttaccccaggcctccaggggaaggcggccctgtttgtctgttcgcctttgtgtgagagctttctctagagaaagtgcagaacagaggccaggcgcggtggcttacacctgtaatctcagcactttgggaagctgaaaggaggtcaggagttcgagaccagcctggctagcttggtgaacccctgtctctaccaaaaatacaaaaaattagccaggcgtggtggctcatgcctgtaatcccagcactttgggaggctgaggcgggcggatcacctaaggtcaggagttcgagaccagtctgcccaacatggcaaaaccctgtttctactaaaaagacaaaaaattagccgggcatggtggcaggcgcctgtaatcccagctactcaggagactgaggcaggagaatcacttgaacccgggaggcggaggttgcagtgagctgagatcacaccactacactccagcctggacaacaagagcaaaactctgtctcaaaaaaaaaaaaaatacaaacaattagccaggtgtggtggtgcgtgcctatagtcccagctactcaagaggctgaggcaggagaattgcttgaacccgacaggtggaggttgcggtgaggcgagattgagccactgcactccagcctgggcaacagagcaaaattccgtctcaaaaaaaaaaaaaaaagagaaagtgcagaacagggtgggggttctggctgcttgattgttttcttttcctctgggatccaggaaggcagaaattactttcccggaagagcccggagaaagggcagcctgtctgaggtctgggaggagaggcacttacccctgtgcgtggaatgttgtgtttggggtggaaattcaggaatggggctcttctctccaagtcagtcgctgcactcctgggttccccgcaacccagaaacaggggctttgctttttagctcctggttctgtgagcgaagtgtttctgttctcatttagccctggggcaagaagcttagactatgacttttaggaaccggaagaactttcagaaattccatgattctcaaactctgctcccttgaagaagcagtatggaggcctgccctcagttacagtgaaaaaaagggttctttcctcaactcccaggaaaaattagatcatagatacattttctcaattttaggtctctactaaaatttaaaaagacttttttgggctggacgcagtggctcacacctgtaaccccagcacttcgggaggccgaggcgggtggatcaccttaggtcaggagtttgagaccagcctggccaacatgttgaaaccccatctgtactacaaatacaaaaattagctgggcatagtggcgggcacctgtaatcccagctacttgggaggctgaggcaggagaatcactggaacccaggaggcagaggttgcagtgagccgagattgtgccactgcactccagcctgggtgacagaacgagactctgtctcaaaaaaacaaaacagactttgtaaaactcatgaacattttctaacatatgcagaagcagagagtagtgtaacgacctcccattgccatcacctggctccagcaattatcaaaagattttctagtaagtcttcaacccttggcatttgcatccccactcccaaccaatgaaggtagcagtgggcattattagaaaaaccaaaatgttgatttaatttaaaagactttagtacacttgacttgcaatgtggagatctccaaacaaaatatattttctgctaataacattattccttattcctatgctgtaattaaagaatccatgaattccagtacaagttttagaactactgatctcattttcagactaggggacttggggctaccgagttttataactggccacaagctcccaatgaagaattgggaacaggactagaatggaattagaatttacgtttcctattccaatgtggggcccaggccctgactgtcacacagtctcctcctgggctatgcctggggttaggaaggggctagatgcaggtatcaagaatggggaaaacacaggtagctttcaagattcccaagtcgccctcagactcaagagtagtagctgttgctatcaggcctgttttctttgtttgtctgtttttgagacggagtttcactcttgttgtcaaggctggagtgcaaaggctggagtgcaatggctcactgcagcctccgcctcctgggttgaggcgattctcctgcctcagcctcccgagtggctgggatcacaggcacctgctgacacacccggctaactttttgtatttttagtagagatgggggtttcaccatgttggtcaggctggtcttgaactcttgacctcaggtgatctgcccgccttggcctcccgaagtgctgggattacaggcatgaatcactgcacccggcctatcaggcctgtttttgttttttggtttttgtttttttgagacggagtttcgcacttgttgcccaagctggagtgcaatggcacaatctcagctcactgcaacctccatctcccaggttcaagcgattctcctgcctcagcctcccgagtagctgggattacaggcgtgcaccaccacacccggctaattttttgtaatgttttctaagtggtgtaacaacagcacagacatttctcctcttttctcagtctcattttgctctctgacatttgagcccttctgaaactgcctccctgggccttcccaaggccgctgcaggttcctccccacctccttcagctgatctcaagcggcaacctctgttagctgcatccccagatctccaccccccaccctctgccagtgttgatccactgaccccttacccaccctcctagatccaagtaccctcctcctcccaaaaaaggcacctcccctcctgacaaaccacccagccttcaggacccagctccagctgttccccaggcaatatcacttgaagggccagccagcgcttcctaatctcagaatgcaacgcctgcaacctttcattcagggcacctttactgagccggtttccagaagcctccacagctgagtgacatgtaagatactgggactaccagaggcatagaggattcctagttttcccatgataggatgagggctcatagcacctgcagaaagagctgccctgaatggggcgtagacgaatgctgcctggggtcatctacgcatcagcaggggtggcttctggcttttgacggttgaactggaatttaggggagggctgaggaaggcatttcagagggaggaatacagcaggcacatacctctcgaggcacaagacacttgggcttttcaggaatgggagtttgttgtggtggtgcacagcgggtgtgggcagaaagcagctaggaaatgtggctggaaggtggggcaggggccagaaggaggagctgccaccagaccccaggctgcaccagcccttcccctaggctgtgtgccccacctggggggcttcttccctgggaacgcactccccagcttaacttccttctccttgcccacccttgttggaccacagttactgagtgagcctctcccagattacccccttcaggctttccctcccccaagatttaagacgactcagaatgtcacaaaatgaaagaaatggaaaataagtgaacggggaaaatgagacatttctgcagtccctgaggctgaagtgagaattcctgctggagctgggaaggaagttgttgtcttctgtctgttccatctcctgttgctgttccttcacctgcttactagtcctgtaaggactaagctctgttttaatcatgatcacaccctgccatagaacctccaatggctccccattgtctcccccatcatgtcagataccctctggctatttctcaagtcttcaacccttcgacctccacaatcagcccaccccactttcactacagtcctctaatagaagggtgtcccctaggaagggacattgccatgctccttccttccttcctgtcatcgttcctgctgtgatttccccagtccattcttcagggttgaggccaagagctgctgcctcctccaggaaggtttccaagatttctccagtccacaatgacctcttcccttccctgaatccctgtaaccctcactggggtttgtttgtttgtctgagacagtttcactctgtctcccaggctggggtgcagtggtgcagtctcttggctcactgcaacctccacctcccaggttcaagtgattctcgtgcctcgcctcagccttcccagtagctggaattacaggcacgcaccaccacacccagctaatttttatattttaagtagagatggggttttgctatgttgacctggctggtctcgaactcctgaccccaagtgatccgcctgctttggcctcccaaagtactggaattacaggcatgagccactgcactcagactgtccttacggttaatattacttagcactcaatcatatttcatcagggtatttttcactgtttcttatgtgttgatcacatcttcctctgtctggcctaatgcaatgggcagggagaacaggcccagtgaatacctgctggctggctaagcagttgggaggtaggtgaatgtgggaccacttctctgggaacatgagatcttagatttccaccatgacaagggcccacacacttgatttcgaggtggtttttccaggggtgctgacaggtgtacctggaggatggcatggggactggtatggacagcctccatgggtaaaggggggccagagtctcctccatcctgtattcctgccattctcaccaggcttctgagctgaggagaaccttccttggcctggcagagctggccagggctgtggggagggcagggtagggcagttcctcctcccaaaggaaggcactcccttagctcctcttccttctaattctcagagcaaaatgcactctgatggagggcttgagggttaggaagggcctctcgcttcattagccctccctgtagctctgcaaggcagatgagcacagagacccagggtcagtagctgggcggtcatctcgcctgggaagccactcactccagtttgtgtcgcggctggtggttttaggactcagttacagcacattgatggcatgactcgctcattaatctcttcaccccagccggattctaaattccgtctaggcagcgggtaccatgtcctattgttctaggatctggtctctttcctgcttccgacctgaaggtagggacccttgactcatgcatccttatacttattagatgcttaataatattgaatagtgataatgaaacatctgtgactggaacgtcatagtctctcctcccttccctcgccacactgagatacaacccactccctccgcccagggctgcccagcagatagcagagccttcatggaccttaagggttggctgctgtttactgcgacctttggaggcaagttcaaatactgccttaagaaaggtcccacttactgggtgtgggaccttaggcatcacttaccctgtaccccagctgaggttcctcctctgtggatggacttggctgtactctgcatctccatgacagcagcactcgccagcttgttttctgcctctacccatttctgcatttaagctcgttcaatacaggcattctgggcaccccctgcccccagggctggcatgtgggaggtgcagggtgaaagtgtgctgaatgaatgaacaattcttatctcagagttgtgtggacaacacacaacatttaaagctcctagcacagagctagcatataataggaactttataattttttagaaagtattttaaattacataagtattacacaaatacattcttgtgaaaaagtccgcccaaacttgccaccccaaaattttattttgagacagggtcctgctccattggccaggctggagtacaatggcatgatcatggctcactgcagcctcaacttcttggctcaggtgatcctcccacctaagcctcctgagtagctgggaccacaggcatgtgccaccacacttggctaatttttaaattttttgtagagatgggggtctccttatgttgaccaggctggctttgaactcctgggctcaagcagtccttttgcctccacctcccaaagtactgggattacaggcatgagccaccacacctggcctgaaaatttaattccttcaccagaaatacttgatgctatcagtttggtgtaacgtcatgattttttcctatccgtgtgtatgcgtgtaaatatataattttgcttcaggggttctttttttcctgttctttttacacaaatggaaccacactgtagtttcattttacagcttggtttttgacttccaataagtctgtgcaatctagccacgtaattactattatattccaccatgtggattcccatggttttatttagccattctgttattggtggccatttatgttgtttatgatattttactgtttagcattgcagcggtgaacatccttagtcatacctctttgtgcatctgtttctctaagacagatacctagaaagaaaaaggcctagctgaagggaatgtgcattttacattttatgacatctgccaaactgccctctaaaaagggcactccaatttatgcttctgtgaacagggtatgagaagacctttgccaacatcaatattttgctagtcaaatgggtgggaaaatagtatcttgttatgcttttaattggcatttcccagataataaggttgaacatcttttcctatgtttattggccatttgtgctgctgcttctatgagcttagcaaatgttgcctcctctgactttacaaccctgcagtctcaacagactgtgcttcctgtctgccctgaggagagcaggccatgaatgtccagaaggtcccccatgctgtgtcatattccatttaataagcagtcactcagcacctactaagtaaaggggccttgtgctaggggctatgggaaggaggagataataaggtgtgatctcctgggctttagtctagttcaggagaaatggaagtgcaaagtagaccagtaaaggctcaaaacaaattattagccaactgtatgggaagcagttttagagcatttggactggaagacattcctcacttatttgccctacctgaccttttgcagcgtggcctcaaaaataacatcacccttgaaggagatgatgatgtttggagtaggcacagcaagtatactttacccaaggctgaacaagttctagaggctcccatgacagcctgtaagcagtagtgacttcgagggctggcctttaccataggctactaaagttgccacagagggactccccattgtcctttaagtagatgggttggttgcgcaccagagtcttcacttctggggcacagagagaacagctcttagaacaacccctactttttagtggtgagaaaaaaagaggcagggtggggtaggtgactagttgctggcccagggccaactcctggccacagcaaagcctgaaccagggaaagggtgttgaacttcactgagcacctactttacatcaggcactatgccaggagcattagctttcaccacaatcctaaaacatattatctgcatttaatgtcttttttttttttttgagatggagtcttactctgtcacccagtctgaagtgcagtggcatgatctcagctcactgcaacctctgcctcttgggttcaagcgattctcctgccccagcctcccaagtagctaggattacaggcacctgccaccacacccggctaattttttgtatttttaggagagatggggtttcaccatgttggccaggctggtcttgaactcctgacctcaggtgatccacctgcctcagcctccaaagtgctgggattacaggcatgagccaccgcgcccggccagaagtatttttttaacctgtattttgctattagaaaattaagatttatctaggtaagtaggttgcggccacatgggtatcctgatggagtggcccaatgggcaaaactagactccaaatctcgtgttgcttctgttgtgtacccaaatgactaacctacactcccagttttcctggtttcctggcttggaaattgtcatgaaattgaagaatgcatttagaagagagggagagagctggcccggctttccagcctgccgcatgctcttcccgcccccggcctgcagttgttggggctgctccccatgcctctttgccaggaggctcaggtccctttcagcctccccgaccacccctccctgctctactcatgtggtcctgaacccttgcccttgaattgctgttttttcatgaccatgtggatgatgttgtgaaactggattaagaaaatgttggaatgagatttgggaggcctggtttctcgtctcagcttctgcccctccttagctatggatgtgaggaggtctttctgctttcggcattttagtttcctggtttataatgcgacagaaatagatgagatgaccccagagattctaaaattccatcacggcaggttggggggtgagactggaatcatgatctgcactctctttattacctagattaccttgtacataaattctaaattaaatatttgagtgaattctcagacctcgcatatacgtctcttctaaaggcacatacgtgaagcatccttataaaaactctttttggccgggggtggtggctcacgcctgtaatcccagcactttgggaggcgaaggcaggcgtatcatgaggtcagcagatcgagaccatcctggctaacatggtgaaaccccatctctactaaaaatacaaaaaattagccgggcgtggtggcaggcacctcccagctactcgggaggctgaggcaggagaatggcgtgaacccgggaggcggagcttgcagtgagccgagatcgcaccactgcactccagcctgggcgacagagccagactctgtctcacaaaaaaaaacaaaacaaaaaactctttttaaaaaaaaaacctttggcccagcacagtggctcacgcctgtaatcccaacactgtgggaggccaaggcgggtggatctcttgaggccaggaattcgagaccagtctggctaacatggtgaaacgccgtctctactgaaaatacaaaaattagctgggcgtggtggcacatgcctgtaatcccagctacttggaaggctgaggcacaagaatcgtttgagccagggtggtggaggttgcagtgagtcaagattgcgccactgcactccagcctgggcgacagagcgagaccttgtctcaaaaaaaaaaaaaaaaaaaaaaaaaccaaagggttgtccagcctttactgagcagatactgtgtgctcagtctttaagataccaccttgtgtgtctgggtgtctactatgttccaacattttctagacactaaggaagcaaatttaaaggcaagtcagaattctaccctcccctgtgagaggttggtaggtaaatgaatgaattgtgctgtagccagggcagggttgttttagaaatactaagggaaggactgtgcaagcaactccctagccctgcctaagggcctcagggaaggcggtgcctagggagaggcagtgtaccgccattgacctgaacaggactgcttggcagggacagtgggggaagggcatggagtggggtcctaagggaggtggtcaaagaaatcctctaggagtttggagtctagagtgcctcaaagtttttcccatagcactgtctatggggctgacaaagcagaaaatataatagccaatgttctctctgctttaaaaaccagactgcttgtcagggaggccgtgggatgttcacatatggggtggtctgccagagccctctgccgctttattaagaggccagtacactcgttaaaggagttaatggacctcagtacttactactgattgcttagtaattcagtacttggtaaataaacatgatactatgctagtggcggggtagggggagaccaattggatatagtccctgtcccagaggcacacattgtcaagtggaggaggcaggaatgtttccaacaagcctcagtggcagtcagagcgtggggcttgctctgtgctcctgtgtaaagagcccaacatgaagcataaaggagcatgagagcagcttctggaggactccaggaaagcttcctggaggaggcaggcatcctttgagaatttcagtaagtgcaaaagaggctgggtgcagtgtaatcccagcactttgggagaccaaagtgggaggattgcttgagcccaggagttcaagagcagcctgggcaacatggccagacccactctctacaaaaaaaatatttaattagctgggcatggtgttgtgcaccaatggtcccagctactcaggaggctgaggtcgaggctgcagtgagccatgatcatgccactggactccagcctgggtgacagagtgagatactatctcaataaattataaacaaacaaataaaaaagtgttaaagaggaggaaggcatttcaggaaaaggaactactgagggcaaagagaaggaggcatgacttctgggttgtttagggagtagtaagagatctggtaactagggtgcaggggttagggaggatgggcaagaagagacagaactagaaagcaagatggtcacatcctcagtggtcttcctgccatagtgagaaatttaggcttcgttgtccagtggagagcaggggtggaagagaattggacacatagtttaggaagataacctggcaggacaataagtattccccagagagaggaagtttagaagcaggaccaggtaggagaacattacatttggccttgactgagggttgaggtaatgagaggcaaacttgaaggaattgctagaactggtcctggttggaggggagggaaaaatttgtctggtattgggagctgggctggggatagggttcattatctgaggtagagaatcttggaggaagagcaggtttgaggcaggatgatacagtgaacttttcattttcttatgtattctgatgagcagaagtttttaataaagtccaacttacccatttttttcctttattggttagtgtttgtgtgtgttatctctaagaattctctgtctaccgcaaggtctttaagatattttctcttaggagggggtggatttttgagctagggtttggataagctgcttttgagaagccagcagattggtgtcaatggggacaggttttttttttttttttttttgagacggagtcttgctctctcgccaggctggagtgcagtggcacaatctcagctcactgcaacccttgactccctggttcaagtgattctcctgcctcagcctcccgagtaggtggggttacaggcatgtgctgccatgcccagctaatttttgtatttttagtagagacggggtggggtttcaccatgttggccaggatggtcttgatctcctgatctcatgatctgcccaccttggcctcccaaagtgctgggattacaggtgtgagccactgcgcccgaccccaggggacaggtttagtcagattccagggtggtcctcatggaggggacgcacaggcaggagggcagggagagaaagcacagaaagcagacctgctaggagaggaccaggatagggaggggcagggacaaggacatgggacttctgggagcaggtggccgggggtcaacgtccaggaggatttcctgaaccagttagaggactactgaacccccctttcacctatctatgcagccctttacttttacaatatatacatttctatttattttatttatttatggttttttttttttttgagacggagtctcactctgtcacccaggctggagtgcagaggtgtgatctcggctcacttcaacctccgcctcctgggttcaagcaatcctcccacctcagcctcccaagtagctgggattataggtgtccgcccccacctctggcttttttttttttttttttttttgagacagagtctcactctgtcacccaggctggagtgcagtggcatggtcttggctcactgcaacctctgcctcccgggttcaagtgattctcctgcctcagcctcctgagtagctgggactataggcacacgccaccatgcctggctaatttttgtaattttagtggagacggggtttcaccatgttggccaggctagtctcaaactcctgagctcagatgatccacccacctcagcctcccaaagtgctgggattacaggcatgagccaccacacttggccacctctggctaatttttgtatttttagtagagatgggttttcaccatgttggccaggctggtctcgaactcctgacctcaagtgatctgcccacctcggcctcccaaagtgctggaattacaggcgtgagccatcatgccgggcctacgttaatttttgagacagagtcttgctctgtcgcccaggctggagtgcagtggcatgctctgatcgtagctcactgcagccttggactcttgggctcaagtgatcctcccacctcagcttcccaagtagctggaattacaggcacgtgccaccatgccctctgtggagccctttctgacttccatcaactccctgcgaccaccccgcatccttcacctctcagtccgcactccctcccaggccaactgcatggtgagtgtgtgtgtgtgctcccaggccaactgcatggtgagtgtgtgtgtgtgcaagtgtgcgtgtgaatgttaccatttttctgacttgccattcttcagtagcaactctacagatgcgacagctcttccccgttcctctttagtccatgaatggtgggcagtataaatattattttcacttgcaactcagatggattgaacaaaaacaggaataacagctcagcctcctgtatatttgacgctagatgctgttggaaaggcagctttgtggggcaaaaaaaaacaaaaattgagtgagcttgcttatatataccaaagatgctcttagacttcaatgtttctcaaagggtgagattgtgtgttacctcaccagaaccacctgggcagtgcattaaaaaggcacactcctggagcagaagctctgggacagtacttgtaggtttgattttctagccagcccccagatgattctggggcttactacagcttgaaaaccaccaagcttcagatgattagaggtaaaccaaatctggcacagatgagattcccacacagatgtattggtagatgcatttattgtatcgcctgcattggcggcgggggtctctctacacattttgtttaaacctgggccaggttaatcacgttgggaatctagtgatgtacccagcaagggtggtttcccaagctctccgggtaattgatagggcttgggttgccagtctgattgtggtaacaagcaaaggaagaagtagggactgtaaggcgggcagacctagggaacagtttccaaacagggttgggggggaaagaccggaaaggacttggtacaggaatttaaatgtttcctttcggatggagatggcaggggtcctgctgttttcagcaatagttaccgcagtgcctgtctgctgggctcctctggagtcttctctttggaccctgaaacttgagagggtctgcatgcctgaatctgaatgcggctcctttaggcccctccctttgacccctggagcctggagaaggggtgggggaagggtggggaaaacaggcctggctgttaaggtttaccaggttccttttggccacaccccccttagtataaacttaacacttctctccagggtccagtttctaaagcaaagtgacagcatcgacacgtccctaaagcaaacttgtcatgaagtccctcacctctcaaatgtgagtccctcctggcttcctttgattttatctgtaatatttagcagatacgtgtgattctattaggctagttaggaaaccaaggcccaaagaagctaggggttatttaaggtcttgtcatcagctgtaaaacaccctgctcagcgccctgctcagtgaaagacctggcatcccctcccagttgaatttcctggtaaggggcacctgagatccggtatcagtggggtactgctactctcccacccctgccctggcatctctgctccctggccccagactccgtcactggtagagctgggcagacccagcagttccaggatagcgggtggaagtgagcaggaaggaagagctgggtttgtggagaagccttccccttatggggcaggctatagggaaagggaaggcagccaccaaagctccagagcctgatggcgcatctattgggctgggacttcccagcatacaccattagggaagtgtagggttggctgggagagaacgagggagccaggggctctgggatagaggtggggagagaaggggaggtgagggtatcagcaagagggaagttgggctttcctttccagcagttgggctcccccatcctgcatcttcctccttgatttagaagaattcatctagagtgtcagtgcaaaaagccccttaccactccccctccctaacagataccctaaggctgtgcttgtgcttttcattcctgccattcatctgccaggaagctcatgcagttacagatgccccctagatctggccattcctgtctgaaaaacctgggaggttgtgcccattcctagtttccgctctttcatcttcccttgagccttcctgccttgactgatcccagctgcctctgagttccttcggcacatgtagaaagcatccctaccacataatttaccatctaattgcatgctgtcttgaatgagggctgtggtttcatgtgtggtgggtcttgggtacacaattaggctgtgagtaacagaggcctagagccccatcatgtctactagctcttgcacctctttgcttcccttccccccagcctacctactgcaggtgctaaggactgactgacctgatccggtgtttaggtgagcttcaggcaggctcccaggataaagcacaattcgcttacaggttctaaaaccagactgctcagtgcaggggttaggggggtgcccctgcccgacagcatttgcccaaatgccgctcctctccccagactcagggaggaggttctggggcagggcccaggtttggggtgatggcatagagcccaaccaggcagcacactgcagttgccatggtgacccttttgcttttcttcaggaggatggatttctcttttagcccaaatcatctgcctgggctactctgagaaccagattcctagccccctaccttccacattctaccacagggggcagcttgtcagaggctttggtttgaaatcacagtccagcatcagacagcaacaggttgtgcttgatcagggagcaggtgggaaaggcccagaggagggctcacctgggacgcatgccccgagggagctgacctccatctccttctgcttcccctcctctctccagaccacttctctccagtgaattgctctgacctttcaggtgggctcgggcctctctaggcctcagtgttctcatttgtaacagacacagccagggtctccgtgtttccacacctggctagtattagaattacccagggaggttttaatagattcctgggccccaccttaagcccgctgatctacgtaggtagaccccaagaatctgtatttttaaagccctccttgggtgatccagatgcaattaaaccaaagtgaatctggggttctcctggcgaggtgattagcaaggccctcgtgaaaagaaaggaagttctgcctgtgctaaggattgactggcctctccgggcttccaggagcttctggagagccccttacagcctagtcttgtcaggaagcgggtgtttcctggtcatgccggctaagccaagaccagacccccacttctctccctccagagaagccaggagagagagaatgacaggaaggggggatgttgccataacaacaagctccaagcagaggcctcccttccaggggctggtacttcaccccagtcctggtggtttccatggagatgggttactgagggacagggggaatgtctgccccacttagagcatcagccaggagctgccagaaggcagaacaccgctaggtgcgagcctttggacccctctgctctccgggtgcacatctgacaccttccccctgcttagttgctctctctgcgactggtctccttagcaacaagtcctgctaactccacgctgttggcttcatggctatttttagcttcactgccagcagcccagtcctggtcatttgcttgcaacctccatatggattgcaagggaataggaaaacaaagattcccagcctcttttggtagactgggacctcgtagcaacgattagaattcctgctatgaaatggatccattccccaacttggaacttgggcagtggatttgggataaggttcctgagacaacactgcattcagttcatttttaatcctctactatgggcaagatgctctagcccacactgcttccatacgaaggtgaatgaggtccagtccctgccctctaggaatatttaatcttgtaaaggagaaagatgagtacacaatcaccttcgcacaaggcaaagactggcaggtcctaacagaggcttacaaagtacaaggggagtgtggcagggatggggtagaagataagggacagaagggaaagataagggacagaagggaaagataagggacagaaggggaggataagggtgaggggccagggcagcactgtcaaaagaactttctgggatgatggcaatgttttaaaatcagtgccatcgaattcagtagcccccagccacatgtggctcttggacacttggaatgtagccagtgtgactgaggaactaaattttaatttgtatttaattcaaatagacacatgcagccagtaactgccatcctggacagtgcaaggctagaggaactttcatggtggaggtcactggcggactggtgtagaaggatatgcagggtttaggtggtgaaagttgaaggggaggaaccttccaggaagaaggaacagcatgaggaatagcaagtgggcgggcaaagcgtgggcttcatgatatcacacggaggcctccagattcgtgggggcctagaatgtcacgcagagtgttgactgattggcattgaggcttttgagctgtaggtgggaggaggacgggttcagaacagacatccatcctgacctctctttttgtctggatcaggtctccctggtcttggggttggtgggaatacgtgtggggtggaaatacgtgtgcagtgacttcatatgtgttgctttgcagatggctttatagggaccatggcttctctgattcagagtagagagactcgcatggtaaatgtcctggtgggatgacagcaacatcatctaccctcatcctgccggaactggattttatgacagagcatgccacagagcactgaactttgagtaaaacgtcaggcatgagctccgggcgttgctgctctttggagaggtatcatgatgggctagtgtctcgtctcaattctttgaggctggaaagtcacattaacatacttatgatcatgactcttcaatgacccaggagaatgatgcaccccagaatgttagatttaccaattgataacaggacatgtccttgccacacaaatcataatgcttgtcctgctgttttctggcaacttactggtatcagagtcattggaaaatgtaattaaaattggaagtttgcttgatgaatacaggatcagggcagagaggtgtccttcagaggtatttttgtcgggcttaggaggcctatgggatcactgttgtctgcccaccaaacaggaactgtgctctcattctcaggtcactctctccattggaccacactggatacttcctttccagcacctcttttaggctcttgacatccagcatattttcttctcatccaggagttcctcctttcaacatacttttataacaaatccaagaacatggcttattttacatggtgctgctatttgagtttggctatctttaactcaaacaaaagacctatctggtaaactaccagggaggtttactttggaagctcaagagcatgtgtgacctgaggatccttgaagattgccccattttagtaaggggatttttccttttactaaaatcacccctgctctagatcttggggtctcttctgctttggggtctgactgtgcattgaccacaaagaagacacatctctgtttaagcgactcagtctagaaaaggcagtgtttcctgtctgcatagttacaggagagggaagaaagatgctctgggttgttaaggggacacctttgagcctaggcttccttttgcttgttgggaagttgtgtggaagaggtaggatttgactttaatgttaaaggatgagaataaggaagtttgacggccggagggaacagctacctaatatgtggccaagagaaagtgaacagttctggccagttctgacaccttgagtccttgctgcacgcacggcatcattgcagtcttatgtcccaagaccacagaatgtggagtctaaggtgtttagccgcattataatggaagagcgggtatcgtacatgagacagtgtctgcaaaaggccaccaagccagaaccagaaacttcttttgagaggaggcctgaagtaagttctcaggcccgttgaccggcatggatgcagaagaggtatcagtgagagaagcagcgaagcaagtcatgctgcattccctaaaggttgggagcaggcaagagggacaaattctgggcttctcacttctgcttggggagcccctggaaatgtgtaccaggcaaataccttagttgggttgaaagatgggttggaacagaagagggcctgtgtttttgtttgtttgcttgtttttcgaatagcttcttttcctagctgtatggattctgggtctcagggttgggggggagtctgtacccaagtcttctaggtagaaggctctctggtttggggtccttgctcttcagggtttgcttgctctgatggccctcagggggagggggggctccctcactgcacatctcgtgacttcattataccagcacctgtatgtcccaggtgactgtggctgggagccaggcacctagagaattgtctcattgtcattaggagatggtggcgttccatggccaaagagggctgatgtcatcactcgttttgcagatgagacaacagatttcttgggggttaagtgacttgtttaaggtcatggtggtggaaacagaactgaagtccagatcttttttttttttttttttgagacggagtctcgctctgttgcccaggctggagtgcagtggcatgatctcggctcactgcaacatccgcctcctaagttgaagcgattctcttgcctcagcctcccaagtagctgggattactggcgcacgccaccacgcctggctaatttttgtatttttagtagagacaaggtttcaccatgttagtcaggccggtctcaaactcctgacctcatgatccgcctgcctcagccttccaaagtgctgggattataggcgtgagccaccgcgctcggccaagtccagatcttctaacaagtgccgctgcccaaatagccctctgctgtggggtgcattttcctccatttcctcagttcttccttctaattcatcttgccaacggcaactaggctgatttttccaaaatactcattcatcttgtcagaaaacctgcggttattcttccctgctacagaatatacccaaggacgcacctgaaggcttgccattaccttgccctgtcgtgtactgggagggtggaggtgggcgagggtctcctccctccccagcccggcagctcttgctcatcctacccatctcacctcattccaagtccgatccagcctccaggcccagtcggctcacctggaactgacctctgacctcttttgtcatccatgccgcccatttttttctacttggtatttgtggcatagttacctttacatatgtttgttttacagtgatcctttcatatttctccaagtctagtggaatcttcaacccctcgagggcagagccaacagggtctatttctttatctgatcctacagccaacgtaatggagggctgtgggtggggactgcgtctgccttgggggtaggtgcctttgttcaggaggaggaagcttgaaatggcggaggctgcacctggaggccgcacctggaggccccaggagaggagtcaggtcttctcgatctgcagatgtttgagcctgggaatgaaggaattgctgaactttctgaaggagcgccctcgccgcgaccaaccttgcaaacaggaaaatgagaaatccagggaaggcccagagtgacgcaggggccctgggactcgaagcctgacctcctcacgccgcgctttttgaggcccccccgcttctctattcacctgtagtgtggaggcgggagaccccccaaacaatccccgatctggagcgctcccaatgcctgcgcgcgcctgctgtcactctccgtctgtgtgctgagttttcctacagcttcctgggcctcctatctgtaagctttttctttttttttttttggttgtgcttcagagaaactcacttttcacaactttctcccggctctcccaggccgtccgaaagctccggcttgctttcgcccggacccccggctccctccgggcaggcggctcgggagcagccccttccctcccctcccggccccccggccccgcgctaatctcttccagagctgggggaggggccaggcggtcttcccgaaggcggggcgctccctgcagcccggcctgggcgggccctgggaacgggcggggaacggcctcgccccccggccccgcgcccctcggaccggagaagaggggctggcccagcgccagcgtcggagcgccggccccctccccgggccgctcgcagccaaccaggccctccagcggggcccacgtgacctggagtcctagacaaagaaaatgttccctccctcccccccgccgcccccctcccctcccagtggccccctccgcccccagccccatcgcccccttcccctcccccaagacgggcagctacttccagagcttcagggccgcggctcacacctgagcgcgactgcagaggggctgcacctggccttatgggtaggttcctggacggagccccggggagaccgggggcggggaggcggcagggccggtgggaggatctccgcagccctccgggtttgaaaagagtgaagtatgcctccccggcccgcagcagccgcggcgtcccggcctggcccgagttctggagatgctgacttagtgctggcccgccgccttcctgcccacgagccccaaggccccactcctcgagggctccagtggcacctggcgccctcgggggacaggaagagcagccggccgggagcccgggcagtggtaactgcaggctggggcacgcggagctggtggcccaggagttgggttggaggcagcttcagctgagctggcagatgggtgcctggcacttccctggtgacctgcgtttctggctgggggaccacgcggtcctcagggccctgccagcttgcggcctcttaagagggacagcttcctctcctgcgagttcctggaagcctccaggcaggccgccagaaagaagtggtggggggcgggagagcacggtgcgaccctgacagggggccggcctgtgacaccagggtagcccaaggccgcatgggcttgggggcggtggcgctcagacctctgacctttggaatgggaagcgctgcagtcgcagggggaggtggaggcgggacaactgcctgaggagatgggactggaccggaggcagtagtcaccggagttcccggtggctttcccagtctggacggactccaggcccaggggcttccgtgagccagcagggagtggggaatagtgtggtgtctcttgaatgccgcctggtttctccgcccccctgggggtgagcagcccgcagcccaaatgcgagagcctcgagttcacccctgtttctcttattgtttgcctggggaggaaggcaggagtgcagagggaaaggggtgctttccctacgccccagacaggcctagtctagtgaggcccctcccccacccagctccggctgccccttcccctttcgtcaggccccctgctgctcacccacccccccccccgcttcttccttcccccaccccactgccccagtcctgatggaggccccttcctcctccgccagcccttaccgggccgggtgcgtgttctgcaccaagtgggctggggatgctgaacagctcgcagcgcggcatctgacaagctgggggaagttgtgggggaagaagaatgttcaggaactcgctgtgaaggggctgagagacaaaggggccgtgggggagtgctgagggtggtgtcaggcacgactcctagacctggggagccagaggaggagcccagcccacctgctgctgccgctgccaggaactgatagcgggtcctttccccttcccgcccactgctacctgcacacctcgtactggctcaggggcctcgccacgcctggaaacggggtctttggatcatccgaggcatcaccctaggtcagccacccatgcctgaagcttgagaaggcgtggtgggcgaggagcagcggcgtggtgtgggctcctctgcgagggtagctgacgcagctgaggatcccagcaagggaggcaccctcccccatagcggggtccacacttcagtgcaccttctcgtaggggaggaggcgatggctaattgatagtaggaaggggagggcagagttctggccaggtgagagtggggctagggagcgatgagcaattactccacattcttccacccccgcagtccgatccgtgagctcattccgccatccatgagctcattttcccagctgtttgggggttgggggcaaaggatgcattatcctgttttagaatttgttgagtcagaggaagaactaggacttaacatcttcagtgtttttcggaatcgccataagaaacagattggtctgtggcttggaggcaaagacttgaagactcagtgaaattaaatgaatctgtaagacaatacattggaccactgagcttcaaacaaaggttcttaacctgggacccttggatctggggggtccattgacaggctttgggagagtcctgggaatcattggtccatatatacaccagatttttaaacaggtcagaaaagctttccagaaatccttccgttcaggtgcctttttatgttggagcaactcctagaaaggactgctccaaagtcagctgctggttgtgaggctccgacaggaatgtagaggctgcaacttcagattagagctcttcttcatactccaggttgcttgctcatcctctttacccttgaggatgggtttacattcgcagctctaggcccatgggggagctcttttgaaaggcatgtagaaaatggggttttctcccctctaaatctggtatggtggaaatgggtgcaaagccttgaagtcagagggccgtgtttcctagattcagtaaaaggctaatggttctcagagctaagtatcaaggatttcattctcctttgtagggatcctggagcgggttgtgagaaggaatgggcgcgtggatcgtagcctgaaagacgagtgtgatacggtgaaaggatggaggctgtgcaatgggagaataactggggtttggcttattaatttgttggtgggatggcagagagcacgcctggtctatagtgcctgctcagtaaataactgaatgaatacatgtatttatggatctgaagggtgcacatagaaggggtcgaatctggtaacaatacacactgggtgtgatccataagaactccagcatggcgtctgagcatgggaacagacaggctcttggggagcttcctatggtgtttgagcatgtgctggggggagatgggctctttaaacccagagcagtgatttcttcgtcagcagacatcacaaaactagaattgtggcctggaaaccaggaataggaaggattgattgcccaggggaattgtggagaagaagagagggtcccccttgctttttaaatttttggtgacagggtcttgctatgttgcccaggctggtcttgaactcctgggctcaagcgatcctccctgctcagtaactgggattacaggcacatgcctggctgaagatcctagtcttgattaagaagataggagagggtggaaccaatatctgtgtctaaacaatagtgcctgattaatatttggatagaattaacatctccataggtagggggagggatagcattaggagatatacggtataatgctaaatgacaagttaatgggtgcagcacaccaacatggcacatgaatacatatgtaacaaacctgcacgttgtgcacatgtaccctaaaacttaaagtataataataataaaattaaaaaaaaaacattaacgtaggctagacacagtggctcatgcctgtaatcccagcactttgggaggctgaggcgggcaaatcacctgaggtcaggagttagagaccagcctggtcaatatggcgaaaccccatctctactaaaaatacaaaaattagccaggtgtggtggtacatgcctgtaatcccagctactcgggaggctgagacaggcgaatcgcttgaacctgggaggtggaggttgcagtgagccgagattgcgccactgcactccagcctgggtgaaagagtgactctgtctccaaaaaaaaaaataaataaataacatttccgtatcatagggtaggcaaccgatatgctgatgagattgaggaagattagatctgggaggaaggtttcctaaaaggcagaaaagaaggctggaattgtgtgacttgagttcacctctctacttcaagtctttccatttttcacggcaaggcagctggttggctctctccagcccttgaccttctgtcactgttccgggttttgacaaacatggtccccttgagtgtcaggtggccttgctaattcctggagaggtcaaggtgactttttgttttttgtttccccaggctgagaagaaagccaaggtcattgcaggaatgaatgctgtggaagaaaaccaggggcccggggagtctcagaaggtggaggaggccagccctcctgctgtgcagcagcccactgaccccgcatcccccactgtggctaccacgcctgagcccgtggggtccgatgctggggacaagaatgccaccaaagcaggcgatgacgagccagagtacgaggtgagcggcttcttcaccagccgtggccagctctttccgggggccttccactgccagctcctcccgtcctgctctcctctctccatctcccacgggccgctcgctctctccacctgaccccgggcctcttcgtctccccgattttgctctgtcttgcctcattcagatggagctccctcctggctgtcctgccccccagatgcccagggctggggttgccatggggggatcagggtggcagggcctcgtgaccactgtgtaatgatttctgctccttggggctccaggacggccggggctttggcattggggagctggtgtgggggaaactgcggggcttctcctggtggccaggccgcattgtgtcttggtggatgacgggccggagccgagcagctgaaggcacccgctgggtcatgtggttcggagacggcaaattctcagtggtaagttgtggggtttggcagtagcctggggtgggggaaggttcttgatcccagggcctgtggttttggctgggggcagtctggaattggggtgatggaagtgggttctgctcacccctactctgcctgtggtgggtggaagaagctgtagggataattaggttgcacctgtggctcagagagctaggatgctggcccagttttagccttccaggaacctattcactagaattcctttccacctgcactcaggtacttccctactcttggtctggactcctctttgcatcgggtaattatttatcactgtatctggtcccctccagggctgagactgactctcgaggctcccagcccctgccagttgcaaggcatggggtgggtgcttgcaagtgtaagcctcggcaaacaaggcctggcttgtccccccaggtgtgtgttgagaagctgatgccgctgagctcgttttgcagtgcgttccaccaggccacgtacaacaagcagcccatgtaccgcaaagccatctacgaggtcctgcaggtgagtatccctgctgggagctcggaggaggagcctagagcactaggaggcctggaagttggagtgcaggtcgggcttgagcagaacggaggcccaggaggcagcgactcctttctctccacctcgctcgcccgtatgcacatcccgctcctcctcagcggttcctccccatcttgcctgtgccaccctcactactcagagtctggccttgagcctgacccatctgccttccagcctgtcctgacaaccccaaccctggcgtgtcaccctccaggtggccagcagccgcgcggggaagctgttcccggtgtgccacgacagcgatgagagtgacactgccaaggccgtggaggtgcagaacaagcccatgattgaatgggccctggggggcttccagccttctggccctaagggcctggagccaccagaaggtaaatgagggcacccagctttctgggacccctgcccgccaggcagatccacaccagggctgggaaagccatgcttagggagggctgccaaggcctccacagaggggcccagtgggaacagccggggtctctcttgccctggggtcaggacttgaatgacctgctctctgttggttggctagaaccgtagagttgggaggtgggaacaagttggagaccaggccgcaccccactgtaaggagggtgggggaaggggctggagtttcctgtcagcctgtaactgaccttggcacctgctttcctcctccagaagagaagaatccctacaaagaagtgtacacggacatgtgggtggaacctgaggcagctgcctacgcaccacctccaccagccaaaaagccccggaagagcacagcggagaagcccaaggtcaaggagattattgatgagcgcacaagaggtagttggcctgcttctggagagggtggcaccaggaggcctgcatccgaggagcaggcgcggcctcctctgacgccagctctcctccccttgcagagcggctggtgtacgaggtgcggcagaagtgccggaacattgagggtaagtttgttgcctgggaactctggcactcctagtgtggcatggggcagagtagcagaggcacttaggaaggtttgaatgacatgggaccaggggccacgtcctgcgtgtcacaccaccttcaccgtgcttcgtgcactgtctgtctttctggtgccatgattctgctctcctgtcaatggcgtgggctggtcttcagggtgtgggactccccagtggccacagaagggcagcccctcttgggtgtgactgaactcacctacaggtcccctttcagcctttcacctttgctcacctctctcatcctggggctgtcgccctcagcctggtgctggtggatctggctcaggaccctcggcctgggaggattggggcaggggtcaggacttgaggattaccccgggaatccctcctgagtaacctggaaccagggctgcttctcatgagcaggtttctgtcctgctgtcactccatccctgtttgtggatggtggcattggtgctctgagatgatggcgttcgagactggggtcacagtgcctcccttttccgtggggcaccctggactcttttctggctgccgctctggcacaccccttttttgtggctggtctggtgctgggctccggcccggggagggagaggcccttcggtggtactcaccccatcccctccctctgctttccagacatctgcatctcctgtgggagcctcaatgttaccctggaacaccccctcttcgttggaggaatgtgccaaaactgcaaggtaggagcacacccacccaggagaggtgccgttgaggccggcccttcggccttctggctgactgtgtccaccgcttctgggcatgtacagggtgacacccggtgtgcgtgtgatgtagacttcagagcttcctctggaagcagagtcctgatgacacgggcccttgggtttcaagcttttgacttgctctcatttttctcctctgaaagattctttacctctctcaagccccattttagtccccagatgtggggatgggagcagagcagcggggacaagctcaggcagagtgtagcagggttgccgtgccctggggagcccaggagaaaaacccagggctgcaggaaggcccaaggtggtggtgcagccccctccctggccttgttctcaggctgctctttggttctgtccatggcggtgcacaggcagatgaggtttccccttcccagatctgcagctggggcctgaccctggctaaggtggtggcggggtcatgtcttcagggcttaggctctgtgaggccaggtgtggagcctcccttcgtcctggccgtcctgggacccgtcctggtggtttctgacccttcccgctgctgtctagaactgctttctggagtgtgcgtaccagtacgacgacgacggctaccagtcctactgcaccatctgctgtgggggccgtgaggtgctcatgtgcggaaacaacaactgctgcaggtgaggctgttgtggcctccagtggtctccttagctgggccccaggctcccgccgcccaccgcctcccctcctctcccttccccacagaccctccaccccctagccatgctccagacccggtctttccattccaggtagcacaccttggcctccccggaccagggctgagagtctcctctgctcactgggtctccttccaggtgcttttgcgtggagtgtgtggacctcttggtggggccgggggctgcccaggcagccattaaggaagacccctggaactgctacatgtgcgggcacaagggtacctacgggctgctgcggcggcgagaggactggccctcccggctccagatgttcttcgctaataaccacgaccaggaatttgtgagtgctgggcctggggcgcggtctcgagctcccttggctgagccttggttgtggggcctgagctgtgcgcagggtgtgtgggtctaggagcctggctggagggccagcgctgggtgggagcttgggacaccgatgggcctgcatctgacctgttgtgctcactgcttaggaccctccaaaggtttacccacctgtcccagctgagaagaggaagcccatccgggtgctgtctctctttgatggaatcgctacaggtgaggggtgcaggcccaagaggtgctggccgccttgtcccaggatgggggagccaggtgtgtgggcaactctggcaaaacgaaatgatggttagcttcacagctgttaaaatattatcccaaaggggaagcttgtgtgtgaagtggaaacgtatgcagtccgtggacttagatttgaccaaaaataaaaaagtaaaacaggtggtaaagcagcctgcctgctgggcgcttccttagtaaggaagattcagccacagaggccgagtgatcattagtcagattcacagagatttcacagagcctcaaaggacagattcagcaagacagaaacatacacagttctgttgtgttttgattatacacaagatagtctaaagaagacttatttaaatcacccattatccttttattaatattttggcatatgtccttttcagatttttttctgtgcgtttgtgtttatataaccatacatccatagatagataaattaagtgggtagtgaatgcacacggttttgtaacttgccttgcatttattatattatgattgctttttcatgtcaagcgatataaagctacatttttttttttttttttgagacggagtctgttgcccaggctggagtgcagtggtgccatcttggcccactgcaacctctgcctcctgggttcaagcagttctcctgcctcagcctcccgagtagctgggactgcaggcacccaccaccacgcccagctaatttttgtgtttttagtagagacggtgtttcaccgtgttggccaggctggtctcgatctcttgaccttgtgatccgcccacctcggcctcccaaagtgctgggattacaggcatgagccaccagacccggccaaagctacattctttatttgtaagtgttgcgtaaggttccattgagtcaaagtgccgtaatttatttaacgaacccctattaggtcatttactatttttttaattattattataagtagtgctgtgacaagcatcctgatagaatatatacttgaaccattccctccttaggagaacctttaggagatgctgggtcaccctgcaggcattgtttgcttcatgtgactctggacactgcagaaagcgtcctaggagattgtgaagacacatccacccctctgccctgcccccccagccaagggcttcccggcttttaagaaaggaatagctcttcttagaattcatgtctttggccagagggagataggcagtctcaacccagggaccctggttagagggtgaggcggaggggatggcttccccggccagatgtttgtcttctgttctcagctccatgctgctcttctgtaaacctagagaagttcatttacagctttttgtatcccagactggaaccttgaggccttcttaaatcatgtcacaccccaggaggctgtaaaagctccttggctgggggacatgttgggagcagcagaaacagtgccgtaccctgtttctcccgagaccctctcgggatctgctctgattgtttccttgcctcagttcggctagcatttctggagggggagggatcgtggtaaggaaatctgtgtggttagctcgggggaagcacaatgaaggaggcctcctctgtctggaagagcctttgcaatccacgagagggctgagtgaggaatggaaactgctctgatggggaggcaagggatgcacagagctggggactcatagcggagggggcggtgattccaggggctactgggtggggcagggcatttatgaaacctttgtggagcagggaacattcaggttgagtcaaagggtggggtagaattgtagcaggaggtgataagagggtatggaaggaccaagttgtagacggacaacaacaaagaaaaggcccccaaaaagtcagctgtgattcttcctggatcctggaaccatgtactctccggtcagttttctgcagctttgactgccttccagataggccaaacgaggcatgagacagagcctcgatgtccttactatggatactccagttggatccagaaaggatttaaggcatcttcagggaaaagataggacttgggcctacagctgaccccatgggtcctgttggccagcaggctcacctgccgagaccagggtgccagggagatggctccaagtaacggtgctgtctgctggctggtgcagggctcctggtgctgaaggacttgggcattcaggtggaccgctacattgcctcggaggtgtgtgaggactccatcacggtgggcatggtgcggcaccaggggaagatcatgtacgtcggggacgtccgcagcgtcacacagaagcatgtatgtccatgctgtggggcgcagcccgtcttcccctccctgcacactcagcacctggaggcagcccttgcctcctttcattttgttcatttgccctctttctcttcaccctttgccccagcctctttttctccttatcttccatttgtcctctgtcttgagagggtaaagggcaaattgaaatgggaatttgggctaggcatggtggctcatgcctataatgccagcactttgggaggccaaggtaggagaatcccttgaggccaggggtttaagactagcttgggcaacatagtgcctacttgagctctggctactccctgggctggtttctggacagtttctagtagagctctttggattagagagaggttcctgtcctcccaatacttttggcaaatagctttatcagcttccatatctgggaggctcaggcagggtcttcccttaagcatgactacaggccctctggagtcctgaagggcaactggaggacattcacatggcccagacaccctgcctaagacactcagcatgccaggtaccttcagactcagccatccacttgggtcaccttcccagtgggtggctgtgttgcctgcctgggtgatactagtttccccattggcctaagaaatgatccaacttggtcccgttcttgtttaggacttgtccatggttgcagctagggtcgtgagcctgcagagcagctgggtctcctctctttcgtgtcaaaggacttctttgccaagttcacagataatttctctttcttcctgtctgcctctgtccctggacagcaggcccatcacgttgcctttatcctcccagatccaggagtggggcccattcgatctggtgattgggggcagtccctgcaatgacctctccatcgtcaaccctgctcgcaagggcctctacggtaggtaccatcctgtcccctccaccttctcagctggtgcttccgcacataggcttcctccttggatatttctgccctgggacagctattcccgatgaccctgtcttcccgtgccctccccgtgcccgagccacaccactgtcctatgcagacagccccagctgatggctttctcttccgacctctcagagggcactggccggctcttctttgagttctaccgcctcctgcatgatgcgcggcccaaggagggagatgatcgccccttcttctggctctttgagaatgtggtggccatgggcgttagtgacaagagggacatctcgcgatttctcgaggtatagccagcaaccttggtttggccagctcactaatggcttctaccttggactgctgcttcatcctgtctcatctgcattgtggagctggggactggtgacttctgctttgcaaggggcctgtttgggaagccccaggcttcctggatagaaagggaggaagcagggttagaggcctacctcggaaagaaccagtggtctcactctaagaggtggcattgtgggtgtggacctccggggttgaaggacctgtcactcaatcaggtggggtgccagactcctggggttgggtattctgtatggtgtttgttacacaccaggatctttgagaggacaaaatcagttttccctgagcaagaagggcctatcctcactccctggtaccatgacaggcacctgagaagaaaacaagacttagctcagttttcattccttatcatgtgagtccccgtttaaccctgagccaagtctgagccgcgtgcagagggcttctgctgccagaggcgtgcttggagtggcccttctgggagcttgagcccacctgtgctcctgagtcttggggtgggtcacactgtgagctggtgttctgactgtaagtgtgagcaggcgtctgtttgagttctaatcagggctcatggtaaacacacccatactcgctggagcctgggctctcccagcctctgggtagtctagagcagcactgtgcaatatggtagccaccagccacatgcggctgtttacattaacattaaccattcagctcctcaatcacattggcctcattttaggtacaaaatagccacctgtactagtgggctagtggccactgaattgaacagtgtagaggacaacccaccatcgcagaagttcatttggacaatgctgatctagaacgttccagtgacagcttgtggaatgtggctaggtgtaattccagcttctcctggaggctgcaggctagcccagtgtgtggctcctgagagagaagtaagaggctttgaggctttaaggctcgaccccagcagcatgccggcgctgtttcatgctcctccttggctcatcttcaaaccgtctcctgttttgtagtccaaccctgtgatgattgatgccaaagaagtgtcagctgcacacagggcccgctacttctggggtaaccttcccggtatgaacaggttggtgaaagctcctgggcctggggggctgtgggctgggactgcaggtgggatgacccatagtggggaagcccctgagccgggccctctctggccggcctctgctgaatgactagctgctctgccatgttccttatttccttttccttgaggaggaagaggagtcagggtatagaaaatactcgtctgaaaccaacaactagtggtcttaaagcaggacctttaaaagtactctctttataccaaagaagagtcctgtgctgctgagttaggtagttggttttctgacattggtgatgtgtcccgagccctctggttcttagattctcctgaggcaaagccatggggcatggctttggggctgggaaggggagttgtggccacagcctgttccaggagagggaatcttgcagcggctgcatgcaagttcagggttctgcttaacttaattttactaatcacacactttgttggcttcaggtccttttttggagagattttcttcagttaggttacacagataaagattttaatatctaggaatgaagaaaattcatttcatcagttataaaactggcattataaaaaggctttttaggcgaaataaattgtccagagttggcaattcaaaagcatgctgagagccgctcagtccctgtccattgtggagggaagcgttttccagagtgttctgagtcatgggtgttaaacctccatggtgggctgcttggtatacttggtataactaggagacatcatttcacctggcctcggtcaaataatctccctccttgctattcccatgaggttgtaggaccttccccatctcatacatgtttggtagagttgctatcgagggcttgttgaggggaaggagatggggcattggggcagctggcctgaaactgtcccccgagagttcccaagatacatgtgcatattgggaaatggatgggctaatgaggtccagtattttcatggaaccactcagtgtctcccgacagaccttggtcctgtgggatttctcgcctgcttctttcaactctaaaatactaaactctgagcttctaggaggagcagaggtcctgcatgcagggccgactgggcagtgcacgcataaagagtcggggacatctgtcgagcacctgatttgactgcaggccccgtggttcccacactgagatcctggagccagtgctcagggaagccttccttaaatatccttacatgtcagaaaaggtcagcgttgaaggggacagccagtcagttatgtggcctgcaccctgagaagtgacatatttaatgtcacagaatttttggtctttagggaactgcagaatttaagtctggttttttttttttttggagacagagtcttgctctgtcgcccaggctggagtgcagtggtgccatcctggctcactgcagcctccgcctcccaggttcaagcgattctcctgcctcagcctcccgagtagctgggattacaggcacctgccaccacgtctggctaatttttatattagtagagaccgggtttcaccatgttgatcaggatggactcaaactcctgacctcaggtgacccgcctgcctcagccttccaaagggctgggattgcaggcatgagccactgcgcctggcccagaatttagtcttttaaagcagtacatttaaggcttgcggtttgattaatttcatccagtggacacacccgtgtaacaatcaccacaaatcaagatacagaacattgtcacccccaaagcttgcttcgcagtgggacgcttaaagctcagtgtattttagactaactgatgtaaagatagctgtgctttttttttctttttctgctaggtgttatctgcctgttcacaatttgagaccacttttgaatttacctttaaggattaacgcttggtggatttgtgtctttgcatggctgcagtgtgtgttcgtgtgtttgcggggagtttgaagagagttatgacgtgtgtgcgtgatttggggaaggggctcttaccctgtgaactagtggctgctgggggagggaggggagtcgtgcagctggggcccttcccgctgttatccaggtttctgttgttacagtctctcttctgcctcctaggccgttggcatccactgtgaatgataagctggagctgcaggagtgtctggagcatggcaggatagccaaggtcagctccagcgtctagaacctctgctggggggcagggagaaggaagggcaggatgaggtggagcggtggccagggccttgtcccgcctgcttctccagctagtgtggagaatgcaatttaggagacggtgcagggtcatgcagcagggcagccagaggagggcccagggctgctggccttcagcccttcctccctggtgagtgtcgcccatcacccccggtagacactgaggagtctttaccaagacctggttgtgctgtggcttttttttcatttttaaattttttggccaaaacctattacaaaagccctcaaagcagcctcctgtgatgtggaagctccatttctctctggagctggaatctcccggagtgactacctggggcactgggttctgtgtcagcaggttccagcattcagaaccactggcagctccgagggcatctttgagcccctcagtaacttggcatcctttagcctacaagttactccatctctgaaagaactaattctttggaagacttggaaagtacagtggctacagcttctacttctaaagtctgtggctaggccgggtgcggtggctcacgcctataatcccaatactttgggaggccgaggcaggcggatcacctgaggtcaggagtttgagaccagcctggccgacacggtgaaaccctgtctgactaaaaatataaaaattagccaggcatggtggcgggcgcctgtagtcccagctactcaggagtctgaggcattagaatcgcttgaacccgggaggtggaggttacagtgagctgagatcgcaccactgcagtccagcctgggtgacagagcgagactccgtctcaaaaaaaaaaaaaaaagtctgtggctagatggatctaagattggccaggtgacctccaagtaggaagaaaagtgaggctgtggggtctgtggaggctcctgccctgcgaactctgctcactcagagccatacccagccccctgggtggaccaggccctgtcagggtttggcgagtacctggcatatttggtagacgcatgaccagtgttggctggtgaatgaattcgtgcttattcctcttttctcctcttcatctagttcagcaaagtgaggaccattactacgaggtcaaactccataaagcagggcaaagaccagcattttcctgtcttcatgaatgagaaagaggacatcttatggtgcactgaaatggaaaggtacccgggttgtgctggcatctggctgcagtgtggctgttctgattgctgtgcttgctgcgggggtcctctgcctttcccacctgacttgttttccacaaacgtcctgggaacagtgggttttatcaagcatttcccaacatggcagactcctggggtggactcctgacaccccaggctcctgggtattttaaggttggtcccaagtaagaggagtctaggggccaggagcagtggctcatgcctataatcccagcactttgggaggccgaggcgggtggatcacctgaggtcaggagttcgagaccagcctggccaacatggcgaaaccccgtctctactaaaaatacaaaaattagctgggtgtggtggcgggtgcctgtagtcccagctactcaggaggctgagacaggagaatcgcttgaacctgggaggtggaggttgcagtgagccgagattgcgccactgtgctccagcctgtgcaacagagagattccatctcaaagggaaaaaaaaaaaaaagaggagtctaggaaatcccctgctgccttgtctcccagagaccctgctgatcccccagggaaccactgcagtgacaggaccttaacttgtggtgccaattttataggtcttttgtaaaccaagccagcatagggccaggcagacctcgcagcctcaacaccctgatttgatgcaaatgggactttcggggctggatgaccttcttgttctctgagtgtaactaggatttagccagacaaagagaccatttacacaaacaaccagagcaaacaggaaatccttcagcttctgaagtcaggcaggagttcggctcctttttcgccttccctgctcttgatggggaggatgctagggctacgtgttcgttacatgcagactccaggtgtacgttgccgagctaaccctgcaggagaggagaactagagagtgtgtcctggaggtatttctgagggattgttcaaaattactcttatttctgctgggttgtgaaactctaggcagtgatgaccttactacctttaaggtcacagaaaccagcacagtgcctggcacatggttggtgatctgagtgccgggttgtttataaaggacagaagattcggcagaactaagcaggcgtcagaggagttggtgggtgtgagtgcccctgtccctgcacttcgggtggctgctggtcctccgggtcctgctgtgtggttagacggcttccgggcagcctggtctggccagcactcaccctgccctctctgccttttctcccccagggtatttggtttcccagtccactatactgacgtctccaacatgagccgcttggcgaggcagagactgctgggccggtcatggagcgtgccagtcatccgccacctcttcgctccgctgaaggagtattttgcgtgtgtgtaagggacatgggggcaaactgaggtagcgacacaaagttaaacaaacaaacaaaaaacacaaaacataataaaacaccaagaacatgaggatggagagaagtatcagcacccagaagagaaaaaggaatttaaaacaaaaaccacagaggcggaaataccggagggctttgccttgcgaaaagggttggacatcatctcctgatttttcaatgttattcttcagtcctatttaaaaacaaaaccaagctcccttcccttcctcccccttcccttttttttcggtcagaccttttattttctactcttttcagaggggttttctgtttgtttgggttttgtttcttgctgtgactgaaacaagaaggttattgcagcaaaaatcagtaacaaaaaatagtaacaataccttgcagaggaaaggtgggagagaggaaaaaaggaaattctatagaaatctatatattgggttgtttttttttttgttttttgttttttttttttgggtttttttttttactatatatcttttttttgttgtctctagcctgatcagataggagcacaagcaggggacggaaagagagagacactcaggcggcagcattccctcccagccactgagctgtcgtgccagcaccattcctggtcacgcaaaacagaacccagttagcagcagggagacgagaacaccacacaagacatttttctacagtatttcaggtgcctaccacacaggaaaccttgaagaaaatcagtttctagaagccgctgttacctcttgtttacagtttatatatatatgatagatatgagatatatatataaaaggtactgttaactactgtacaacccgacttcataatggtgctttcaaacagcgagatgagtaaaaacatcagcttccacgttgccttctgcgcaaagggtttcaccaaggatggagaaagggagacagcttgcagatggcgcgttctcacggtgggctcttccccttggtttgtaacgaagtgaaggaggagaacttgggagccaggttctccctgccaaaaagggggctagatgaggtggtcgggcccgtggacagctgagagtgggattcatccagactcatgcaataaccctttgattgttttctaaaaggagactccctcggcaagatggcagagggtacggagtcttcaggcccagtttctcactttagccaattcgagggctccttgtggtgggatcagaactaatccagagtgtgggaaagtgacagtcaaaaccccacctggagcaaataaaaaaacatacaaaacgtactggtgctttcctgtctaagtcgccttttgtgtgttcttttatgaggcccccaccatccacccctctgtgcacaaggcggctcccggcccctggaatgtgatgtttttggtcatctccaaaggctgcagttttatactgggaggctgatgacaccttttattataattattcttatggttctggttataattatgtttgttttaagattttctttaagaaaacaaaaacccaacacccttccctttaggtttcaaaccaaggtgcgggagcagggtgcttctgagttagcggtggctctggtgccctggctcccacccctcgggccaggtgggccactgggcatggtgacagctgggcggccagggagtccccaaggtctgccttctgggcttgtcactcttctcttctacttcccctcctcttgagtcgggtgtgtcagggctggagggaggaccggccgtctctctccttgtgtgtgtgattggagtggtgtgtatttcttttctagtacttggtctgatgatagctgtgctcttacctcgagtcagcagcacctggagccccaagtgctcaacactttgttctacttcctacaaggcaggcggcctggcgtcagtagtaggaagggatggcattgttggctccagggtgagggcccgacgggcaggtgcttgcctgggtagatggggtgtagatatgtggcatatagagatatatattttataatgggaggggggatggcacctcctgggactggtagagctgggaggtgtgtcggcaagcacatggccccaagtccacgtccctagaaagatggggcctacagtgataggcgctctataaatacatagatagggtcatgtttaagaaatattatggggtggggagtgggggaagcaggcttagtgtgctgagcctcggtccccactgcagacctaaaccccacaccaatcagtcaatctcacacgcatacacaggagcatatttctgtactgatgcataatgaatgcactcacacacacacacacacgccagggggctcccagcactcttctcccagggttcaggactttgtggagtcagcccgtgcagctatttacctctgttgccctgattgcaggtagactgtcaatcccagaagttgctaggtgctgaggcaggaaaaggaggaggtttcttttagcaggtgctctcctctagcaggtagtgttctatctcttttgcccctggtgatgtcaaaagattcttctgttagcaacctgtgatactgacctgcaactctaggcaccagtcaagtcagccctcaactccccctacctattctccccaactgaaatcaaattgacatccaggtctgtcttggccagggggcttccattggggaaaaaaaatgggacagtgaacctcacctattgaataaaccaaattagtaattagtgacaaaaccaaaccaaggctttggaccccctgctcattactcaggagtaaattcacacagctggtggccggtctcacccctttttggggtgcttggtcctggaccccaatctactgtctcctcgacagattggtgtttaagatcatgcccagttgcttcctgtcacctcttgacaggtggtgactgggctgctgtggggctggagcagcgaggaagggagcctctgccccctcagtggagtccctgtgctaactgtggtgctcacccagctcctccttgctcccgcggggctctgtccttcgggcctggagtccaccagcgccactccaggagggctgggggaggaggggctgcctcaggcagtccaaggtgctccctcccccgctggccaatgctaaggtcttcccggctcccagggtcaggacagagtcttctaaggctcaggctctcccaagccactgcttagtgacagttagcctttcccagcggcccaagctccaccggaactgggcctggtgctccaaccaaagggttggtgttgggacttgggaagagacttggtagccaagggcatggcaagcctgggggattcctgtgggccggcttgctcgaggagggagtgctgggcacagaggagcccttatggctgacagcttgagagcacttgttcctccagatctagccacttgaccaggccctagaatggaccagatgccccaggggtcatggccccccccccccccccttgcagggacgagagttaacaatcaccagcttttcttccggcccagcctgtgtgcttggtctcacagtagaatttaggagagtgtggggctttgggattgtgccaacttggccaagctgagatatgcttaatccacctcaacgctggggcctctggggacaggtattgggtcaccttccaaggggtgctgaacttcagcaggctgtagataaggcagaggttagaggcagtggagtgggggaaccaagaaggcctagggaaaattgccaggcatattccctgtggaattttctttccgaagagtaggcccatttcccccttagaaacaagggttctgggggctgatgacagcttcccctgcaggtgccaggtggcgcatgatgccaaagagatccgtggctcttgcctgggggaggtagccaggtgctcgtgctggggacacagtccttggcctcctgcctaagcaggaagctagtttccagcaggcggctggtactaaccccccgccccacgggagcgacaggctggtgcaccggcagactggggggccgcaggcgggcactagcaggggtctgcagtccatagatgatgacatgaatctgttgctgtccttttgtctctaggccccagagacttcttgctattgaacatcctattggaaagcaaactttccaagagagcacccgggacctgttagcttttgaaacaggcctgggtgtgattgactggtagagatgcctgtgtgatttttggcgcattgcaggagtgtggattgggacaggcaccccagcaggaaggaaggctgacaccaaaggggtctcacagggcccagctccccttgcttcccgataattggccaccaggccatggcgactctggggaagcctagatgggaacacccaccttctccagcagtagaaggaatatttcagcagagccatctgggagatgttcttataggaaaactgcagtcattcatttcatagttttgcttatataaatagagtacatttgggaggcagttttgaattcctgttgctactctgcttggtgcggagttgcagtggccccaagtgtctttcagagctgttgcttttaggatccccctcaagctgtgggttagggccagggcagggagggggtgctgcctggcactgtgccctgaagagggctgcttgcttcctttggtcgggagcacggcagagccaacattctggtgggaaccgagtttctagccaggcccctgttttggtcccgggaggtgagtaatctgagtttgtcattgcgtattctccacgctgcctgctctcagtgctggagactagagagcgaccctggagttgtcctctgggagtcctgcctgtttgccagggagcagctgaaacctccccgctcccaatcccgggggtggaaaaggtgtagtggaggaatggtctggagctgggatggcccttctggccatgccctgctgagccaggattaaggaaagtgtcagccgcctccttaccaggccctgtgctggggtcaggaggaccgggaggagagggaaggggtgagaggatggactctgctgttgtagtgtgagctctggaatctttacgttttggtaaaggcaggccagggtctttgaggatcgagttggggaaccttgcctctgtgtttccgagacccagctaaggtgggcctttggtgggtgacctgtctctgacccgaggcagcagagttttgggggagggagaaacaagcaaggagcagggaggacaaggacacaagatccctttgctggtggtgacttactcacttcccccaccagagggcctgggactcccgaaactcccgtaactggaaagctccctggctcagctccactggggggtgaggagggcggctccctcagccccagcctagcggcctccaaccctgtgcctgagaacatgagcagcggtctaaagcatcccctagtcccatttcacttcacagaccgatttggttgcacagccctagaattcaacagacaacaaaaatgctgaaattccttagaatacgcagagggaggaggtgactcaccaaggtgctaaaacattttattaaaaatatatattgttaaattaagtctgctgtctggacaatgactgtttgttttgttttcttgtagtggagtttaaaagagactattattttactctgatatattattattaaaaaggcattttaactttgtacttgaaaactaaatgagcgatttcatgtgttttagctgaggcattgaagtagcgggtgcttacttatttgtgggaaatcatgtattcatactgaagaataaactccgtagctgatttggtaataacttttactgttacagacgatttcgctttgaccccggtggcagagcacttttactccacattccacgcagctaaatgcaggacttcccagactcttccctccccagccctctttcctttctcttaagttcctcttttctcctttattattattatttttttttcctggttccagcatcctttcaccactgtatttttttttttttttttttttttttttttttttttttttttttttttttttgggggggctcccctttttttggccaaaaaaattgtcaattcccccttcgggttctcggaaattctggggacccccattggggcccctgggggnnnnnnnnnnnnnnnnnnnntgggggggaaaaaaattccccccgggaaacgcctttgccccggtttaggaatcggggcccgggccccaaaaaggggaattttattttttttaccgggggcattaaagaggggggggcttattttttttggggaaaacattttttctaccggaaaaaaaaaccccctggcggttttggaaaaaacttttttttttaaaaaggatttggttttaaccccggggggggggggtttttttccccaattccccccgggaaaaaggggggtttcccgaaattttccccccccggccctttttcttttttttaaaggcccccttttcccccttttaataatattttttttttccgggttccgccaccctttccccccggaattttttttttttttttttttttttttttttttttttttttttttttttttagggttgcttctctatttattgacaataataatgtacatttcacagtctggttctaggacattcagggaagggcgagtgggggcccgaggggtccctgccccacccgcctggtgtcctgttgtatctctgtgtaagtgatgctcgtgacatagctgtttatgaaataattaaagaggtcaatgcgtacaacagatgtagaaagtctgtcagttccgccttcatcacatttttttttgtgcccagaagaatataataaagctcctttctaatgtacttgtgctggagaacacttgaataaatggactgtttttgtgcaaaaagaaaaatggaaaagcaccgtaataatgtcgttttgtcttgcgtctcctttccctgccatgactgttcacagcctcctccagggggctcaagtacctaagcggggaggtgctagcgtcgggcccagatgatgtagggcctccctaaaaaacgtcacctgtgtgagcatcaaattagtaaatgggagctgtcccctgggtgcaggaaagagtttggttgactggaagctgaaaaataagttatggtgagacagggttgctgggaaagcaaattcagctctgggctgagcaacagaagttttcataccagagcagggagaagagcgcgccttatgccaatgccttggtcagacacggcgcgaggaggatttttgaacctaggtactcaaactctaaacagggttttggcaacaagcgagcatccagagtggtagatggtcgggaatgtcaaggggccccagaacaaatcggggcatttgtcctagaaaaagcaggaattggtaggccaatgtttgtaaacacggacagggcgagcccaaagggccggggtctttccaggtgttccacaggcaggtggaatggtgtgggggaagccagtgtcagctcagcataaggggagggaggtccctttccctgctccagccaacaatgcaagggccaccttgagtgcagtgacagccactcagggatacccccagttttcccttcagaccccaagtctgagttcctctcactgtatggccctccccagagctgtcttgcaagtggacagtgcctcatggtctgcagagcccttcacccagtgttccctttgtctgcatgactcaataatcactagttctctgtccccacctatctaaagtgaccatctggctgggcgcagtggctcatgcctgtattcccagcactttgggaggctgaggtggatggatcacctgaggttgggggttcaagatcagcctggccaacatgctgaaaccgcatctctactaaaaatacaaagattagccgggtgtggtggtgcacgcttgtaatcccagctacttgggaagttgaggtaggagaattgcttgaacctgggaggtggaggttgcagcgagctctcattgtgccactgcactccagtgtgggctggatacagagcgagactgtatcaaataaataaataaataaatgtgaccatctgaataaatgcaagaactgggatgattcataccacatctcaactctaagacctcaagcatctgtgtttcagtttcatcttctaagtgcctagcaggtctagccagtgcttgcttctcttaaagaagggttacttggctgggcatggtggctcacgcctgtaatgccagcacactgggaggccgagggaggtggatcacttgaggtcaggagttcgagaccagcctggccaacatggtgaaaccctctctctactaaaaatacaaaaattgtccaggcatggtggtgggcacctgtaatcccagctactctggaggctgaggcaggagaattgcttgaaaccgggaggtggagattgcagtgagctaagattgtgccactgcactgcagcctgggtgacagagtgagactctgtctcaaaataaaaaataaaaaaaagaggaagggttactcaaggtttcttctcttacattaggtttcaggggtttaggactgtaccacttcactggaagtattgaaagaaattataaggggaacgtttgaggaaaaggggacaaccctactaaactaacaggttttttcctcatgggcacgtctttcttttttcacaaagttgtaactatacatttaacttgtactttttcttagtatttttcagtgttgatgtagaattatttttatttcaatagtttttggggtacaggtggtttggttacatggatgagttctttagtagtggaatttttttttttttttccgtgagacagagtctcgctctgtcgcccaggctggagtgcagtggcacaatctcagctcactgcaagctccacctcctgggtttacgccattctgcctcagcctcccgagtagctgggactacaggcgcccgccaccatgcccggctaatttttttttgtatttttagtagagacggggtttcaccgtgttagccaggatggtctcgatctcctgacctcatgatccacctgcctcggcctcccaaagtgctaggattacaggcgtgagccactgtgcctggctggaattttttttttaaatggcttcgtggcactttcttgttggatatttgtttctatttttttattttagctacaaatagagcttctgtaaacatctttatgttttggcttttttctgtccatattttgtattttttccttaaaatggattcccagaaataaaacttattggagcaaagtagctgcacattttggttggctcctcacacatttgcctggttcttcagctctcaggctgtcagttcagaaagaagcaaacctggttcttagttggaccaattcagaaatgtgttcatctcagtggggaagtcaagacccaagatttttttttctttttgagagtctagaaattagcaagaagcaagaggtataagcaatttcatctggccactgaattttgaaaattagcttatctggaggaatcctggtaggagatggaactcggactgaatcttcaagacttagctccaaagagagatgggagggctgggagaggtgggcattggtgccctttagctctggaagccatgcctgattgtcccagtgtcatcagagctgggagtgggaggtctggcaagaacttacgggacagagggagctactggagccatttggttaataaataccattctgtgacaggccgagtgcagtggctcacacctgtaatgccagcactttgggaggccgaggcaagcagattgcctgagctcaggagtttgagaccagcctgggcaacatggcaaaaccccgtctctactaaaattacaaaaaattagctgggcgtggtggtgtgtgcctgtaatcccagctatttgggaggctcaggcagagaatcacttgaacctgggagggggagtttgcagtgaaccaagatggcgccactgc

SEQ ID NO: 279 - DNA, 3009 bp, Homo sapiens
gccgcggcaccagggcgcgcagccgggccggcccgaccccaccggccatacggtggagccatcgaagcccccacccacaggctgacagaggcaccgttcaccagagggctcaacaccgggatctatgtttaagttttaactctcgcctccaaagaccacgataattccttccccaaagcccagcagccccccagccccgcgcagccccagcctgcctcccggcgcccagatgcccgccatgccctccagcggccccggggacaccagcagctctgctgcggagcgggaggaggaccgaaaggacggagaggagcaggaggagccgcgtggcaaggaggagcgccaagagcccagcaccacggcacggaaggtggggcggcctgggaggaagcgcaagcaccccccggtggaaagcggtgacacgccaaaggaccctgcggtgatctccaagtccccatccatggcccaggactcaggcgcctcagagctattacccaatggggacttggagaagcggagtgagccccagccagaggaggggagccctgctggggggcagaagggcggggccccagcagagggagagggtgcagctgagaccctgcctgaagcctcaagagcagtggaaaatggctgctgcacccccaaggagggccgaggagcccctgcagaagcgggcaaagaacagaaggagaccaacatcgaatccatgaaaatggaggcaaggctcccggggccggctgcggggtggcttgggctgggagtccagcctccgtcagcggcccatgccgaggctcaccttccaggcgggggacccctactacatcagcaagcgcaagcgggacgagtggctggcacgctggaaaagggaggctgagaagaaagccaaggtcattgcaggaatgaatgctgtggaagaaaaccaggggcccggggagtctcagaaggtggaggaggccagccctcctgctgtgcagcagcccactgaccccgcatcccccactgtggctaccacgcctgagcccgtggggtccgatgctggggacaagaatgccaccaaagcaggcgatgacgagccagagtacgaggacggccggggctttggcattggggagctggtgtgggggaaactgcggggcttctcctggtggccaggccgcattgtgtcttggtggatgacgggccggagccgagcagctgaaggcacccgctgggtcatgtggttcggagacggcaaattctcagtggtgtgtgttgagaagctgatgccgctgagctcgttttgcagtgcgttccaccaggccacgtacaacaagcagcccatgtaccgcaaagccatctacgaggtcctgcaggtggccagcagccgcgcggggaagctgttcccggtgtgccacgacagcgatgagagtgacactgccaaggccgtggaggtgcagaacaagcccatgattgaatgggccctggggggcttccagccttctggccctaagggcctggagccaccagaagaagagaagaatccctacaaagaagtgtacacggacatgtgggtggaacctgaggcagctgcctacgcaccacctccaccagccaaaaagccccggaagagcacagcggagaagcccaaggtcaaggagattattgatgagcgcacaagagagcggctggtgtacgaggtgcggcagaagtgccggaacattgaggacatctgcatctcctgtgggagcctcaatgttaccctggaacaccccctcttcgttggaggaatgtgccaaaactgcaagaactgctttctggagtgtgcgtaccagtacgacgacgacggctaccagtcctactgcaccatctgctgtgggggccgtgaggtgctcatgtgcggaaacaacaactgctgcaggtgcttttgcgtggagtgtgtggacctcttggtggggccgggggctgcccaggcagccattaaggaagacccctggaactgctacatgtgcgggcacaagggtacctacgggctgctgcggcggcgagaggactggccctcccggctccagatgttcttcgctaataaccacgaccaggaatttgaccctccaaaggtttacccacctgtcccagctgagaagaggaagcccatccgggtgctgtctctctttgatggaatcgctacagggctcctggtgctgaaggacttgggcattcaggtggaccgctacattgcctcggaggtgtgtgaggactccatcacggtgggcatggtgcggcaccaggggaagatcatgtacgtcggggacgtccgcagcgtcacacagaagcatatccaggagtggggcccattcgatctggtgattgggggcagtccctgcaatgacctctccatcgtcaaccctgctcgcaagggcctctacgagggcactggccggctcttctttgagttctaccgcctcctgcatgatgcgcggcccaaggagggagatgatcgccccttcttctggctctttgagaatgtggtggccatgggcgttagtgacaagagggacatctcgcgatttctcgagtccaaccctgtgatgattgatgccaaagaagtgtcagctgcacacagggcccgctacttctggggtaaccttcccggtatgaacaggccgttggcatccactgtgaatgataagctggagctgcaggagtgtctggagcatggcaggatagccaagttcagcaaagtgaggaccattactacgaggtcaaactccataaagcagggcaaagaccagcattttcctgtcttcatgaatgagaaagaggacatcttatggtgcactgaaatggaaagggtatttggtttcccagtccactatactgacgtctccaacatgagccgcttggcgaggcagagactgctgggccggtcatggagcgtgccagtcatccgccacctcttcgctccgctgaaggagtattttgcgtgtgtgtaagggacatgggggcaaactgaggtagcgacacaaagtt

SEQ ID NO: 280 - protein, 722 aa, Homo sapiens
MPRLTFQAGDPYYISKRKRDEWLARWKREAEKKAKVIAGMNAVEENQGPGESQKVEEDPAVQQPTDPDTVATTPEPVGSDAGDKNATKAGDDEPEYEDGRGFGIGELVWGKLRGFSWWPGRIVSWWMTGRSRAAEGTRWVMWFGDGKFSVVCVEKLMPLSSFCSAFHQATYNKQPMYRKAIYEVLQVASSRAGKLFPVCHDSDESDTAKAVEVQNKPMIEWALGGFQPSGPKGLEPPEEEKNPYKEVYTDMWVEPEAAAYAPPPPAKKPRKSTAEKPKVKEIIDERTRERLVYEVRQKCRNIEDICISCGSLNVTLEHPLFVGGMCQNCKNCFLECAYQYDDDGYQSYCTICCGGREVLMCGNNNCCRCFCVECVDLLVGPGAAQAAIKEDPWNCYMCGHKGTYGLLRRREDWPSRLQMFFANNHDQEFDPPKVYPPVPAEKRKPIRVLSLFDGIATGLLVLKDLGIQVDRYIASEVCEDSITVGMVRHQGKIMYVGDVRSVTQKHIQEWGPFDLVIGGSPCNDLSIVNPARKGEGTGRLFFEFYRLLHDARPKEGDDRPFFWLFENVVAMGVSDKRDISRFLESNPVMIDAKEVSAAHRARYFWGNLPGMNRPLASTVNDKLELQECLEHGRIAKFSKVRTITTRSNSIKQGKDQHFPVFMNEKEDILWCTEMERVFGFPVHYTDVSNMSRLARQRLLGRSWSVPVIRHLFAPLKEYFACV

SEQ ID NO: 281 - DNA, 22452 bp, Mus musculus
cttatccttcagagaaagaaaataaaggtgcagcagtagaaaaaatacatcagtggtgacacacgaaacatcttgtggtgcactcaattctccatgccagaaagaaagagagggagagggaaggaggaagggagggaagaagggagagagagagagagagagaagtcatgcaccactaacaataacaaaaaccagctgggatcaattcacaataacactggtgagatactgagagcaccaaactaagtcccgtgggaaaatacagtttcagccaagttcaaggtaaaggacaaccagtaagtaggtcttgggcagtgtgctatgcctgtgagagagggggaaaaagaatatcccccagggacaggggaagcactcacctccttggtagggccaatggaaaatgatgctcctccttcaaaggagcccaatgaaagcaatgacttctccactggacgccatgttccagggattccacccctaacacctgtgctcacagtgtctgcaaactgaaattcacaccaattgtcttccatttttgtctccttttcctgcctccaaaattcactagggagctgggcaagaggaacttcattgtatggaagtatctcaggcctgaaacagatctttataaataactgagaggaacttcctgcatagtcctccggctccaggcacatccctggcatccatgatcctgacttgggtggggccaactatgtagatttgatctctggagaaactggagtgtcaacatgatgatagttggaactaaggtacacatgcagtgactaaggactgacacaacactaagttcttcctgcaatgaggaatggttggaagataggatttcctaaaccaggtgctggatcagagagacagttgggtaggtcaagcatttgccacacaatcttagagtcaacgtttggatccccagaacccacataatactggatacagtagcatgcatctataactccagcaatcctactgtgagatgagaggtagagacagcagagtcccagaagctcctatgttggctaacctcagtgatgaacaacaaagaggttatgtttcaagcaaggtagtgagaactcacacctgagatcatcctctgacttccatgtgtgtgcagtgacacacacacttgcacacataaagagtgcaggcacagagagatttaaagaaaaaagttagaataaaaaggctgagtccttgcccatagtcctcagaggaaagagtaagaagaggccatggtacaagtgtgcactttggcctgagtgacacggaaattgttttttcagttctcatcaaacttttccctaagaccccaaacctcccaaatgacactataacgcctatgctctttgaagctgtgacaactagacatagtgattctgatttcctctgtgctaacaggaccttcccatatcaatgcctaccatgatgtgacactcacaaagatggctggagtggctaagcagaaattcttgcaaaacattttactagaggacagtgctgcagggtttactcttctatctctggataggttactggggtgggggtgggaggttactacagcaatggaagcaatgggaatgtaaactagtccagccactgtggaagttggtgtgcccatgtctcaaagaacccgatacagatctatcatatgatgcagcaccctagttggctttctgttgatgtgatgaaatgtcccccaaaagaaacttgaagaggaaagggtttgtttcatcttactggtgacagcataccatcaaaggaagccaaggcagacactcaagcagaggctgtgtaacagcagtgcttaatgcttgtttttaagcttctgttcagcttgctttttcataaagcctagggctacctgtctagagatggtattacccacagaggggtagtgggctcctacatcaattagcaatcaagaaagtgccttatagaaatgctgccatgtcaatctaatggaggaaattcttcaaggtttcctcttcccagaagtgctgttaacaagtgaaactatacaagccaacaagagccttttagacatttaccctgaagactcaaagtcaatgtaccacggagatccttgcacatcaatgtttaactatagaactgtccaacacatgggctatggacctgcctaggtgtctatcaataaagaggtggataaagaaaatgtggtgtatacacaccagaggtttttttttttggggggggggcagtagagggattatttcatttgcaggaaaacagatgcaactagagatcatattaagcaaaataactcagaaacaagagtatggtgtgttttctctcataggtacatcctagaagctgcactggttaggtctttgtcaattttacataggctaacaaaatctggagaaaactgaggtatcaataagatggatgctggattgaagacacatgcaaagattagcatggagggaactttaattaaagaacttcttctgtcagattattctagaacttggacaataagaactatctcatctccaagccttgaaaactagaaacctaatcaagctggaggtagagcagattccttatagcttaagagttggggtggtctaggtctctaggtctttgtgcctttgacttttaaacagttgtgttctcccacatctcttcctatcagattccttccatgtatatctccgtgtgtccaaattccttcagtcccattggacttgactcacaaaatgatcttacaactcacaaccagcatatgaggtcaccttctgagagtgcaaatggcagcactgttgttgtggaggggcaagactccatccctcactgttcttggtctcatggcaaaggttcatttcctcttcacatgcttgatacacagacccacctcgtcctagcatgtcaggtgtcttcacaggtgcagaattgcctccacgtccagatttttcacctgtctgtctagatcagattcagatacactcaaggcacacgtgatcttttaagcaatactgcccttcagtgcagaatctgtgcacccaaacatgttacctatccctaaatagcactatgggatgggcctggaatggaaatttcattccaaaaggagccgtcacgaggacaagtagaagtaaactccactattaggcaatgagaattttcacttgaacttgaatgtctccaggtctctcctttctactttaatcttccttcgccaaccacaaaggtttggcctatagctactcttgaactgatagtgtttttgatcccaactcaagaggaaatggataaaggtgagtccccatggagaaaagaaacacaacttcacctggagatagaatgactgggtctgtctagagctggcctgaaggacagttaacagagtagacagcagagggtggtgagcaaggacctaaatcaaattaacagagaggaaagagaccatagtacagcccttttaaggggtcgagtagggaattctgtgtaataagtgtgccgttgtagacatgcgaaccaagctactatgaagagcttcagggatccccactataggaatgaggcccatgctgctgtgggtttgtacttccagccacttagccatcactactcctggttagagatactcaacacaagtgaactgaacttcaacctgggttctgaggagcattggggccccattctcttcctagcaactcaaatttgctggtctaggagtcagaaagaggtagcatagataggagccagtgctagaacccagcagaggtggaggggtggagcctgcctgtcacggggattccagagaaataaatgtttgccacatctaagtgggacagaagttgaagcagtaaacaacattcaaacaccaatgccacaattaggtagccctgtccgaaaacatgcaatatccatgatgcagagaatgtcacaaaaataatgctttctccttacaatttaattggaatatttttcctagtattaaaagtatgaaatactaaagacaggaattggggccatcaagatggctcaatgtgtaaaggcacttgctgctaagtttgagagttcaagcctctaatcccacatggtaggagaagagcagaccaccaaaagttgttttctggcgttgtatagccacagcaaacaaataaatgtaagaaaataaaaaataaaaaagtcttactagctcatagactttatttaacaatgcagacaggagtgacctcggaaacatctcatgatggtctccccccacactgtctcttcctccctctgtacacagtagcctaaggtgacaagagatcaacccccttgctgtcttccttcctctgcccctcagccagcaaatgtttttgtcatcctgtggtacagcaatgtatagcttcccacccatagcaagaagcgccttctctctgcaagtaagccacctagtccaagggcagtacaaggccacttcttttccagtgtccgtgccccgtcttggtctttacccacaatgacacactcactgctaagagcacagactcttttgctggctgaagaatgactgagtgaatagaattcaggcttaaagaaaggtctggtgaacttcagtttatgccttcaaagctgtttctttatgagttccacttgtgcacacacaggccacccatgctctcacacacaatcacagtcacaatcatgttcaaaagtatgtgtattttctttcatacacaatgcaaagacactgtgtcaaaaggagatccgtgctcaaggaccacattcctgggagggggatcagccctctatggtccctcatagactctggctctgaggtttgcctagcctgtctctccatccccaaggaagaattagcataatatgcaggggccctcttccctccctactcctttagctcagaggccctccttttgggagtatactaggccttacaaacttcagcaacttaagagagtgctttcattatgaagtactatattacaacagcatcaccaagacacacacgtttaggagacactcccccttctcagcctcttaatacaaacattaccaatttaacttcttatgtgttaaccaaacccctgaggtggtcagtaaaagtctctccccaatctattttatacacacacatgtatcccttccccctcctcctgcaccctcccccaccacacttgcacaaggtatttgcagtagatctactcaccacgcccaaccttgttgggagcagccaggatgtcctcaggatgtcctgaggctgtgccacatccagacagcagagaaccagtgggtgtgaaaatgcaaacactaatggccttatctacagcttgctgtgtgaaaagagctggcttgaaaatgctgtgcactatgtagttcccctacatgatatccatagagtggggtgtgtgtgtgtgtgtgtgtgtgtgtgtgtgtgtgtgtttgggggaataaaatcaaggtatgctaaacgccagagaaagaagaggataaagagatggagcagaagattttcacctgaacactgggtgacaacagtgacggtgtaatggcacatgctgcgtccctaacattgccagtccagggatcatagctcacatcaagtgtggacacgtagctgtgagggttgaacactgcctcacagaccactgatatatgtgccactaaggtgagggatgtggtattagggccaggttgtgtgtgcatgagggcagaaggtgtcaccttttgtcattcccattcggttttgttattttgttgtgaacctcacactcctttctaaaaacaaaatctatttttaaaagaaacaagaatgcctagctcataataataatagaaataaatattaacatatcattcagaaagagcaagtgtgtagaatgttttgcttattatctacaagctgagggatacgtggtaagatctgggctgggggtcaggtagggagagacattggagccagttgtcaacacacggaaaactgcttcaggagctaaggtctcatccttcacaggactaagtttctccctctttgctggtacctcagtgttgcagttctctaaagtcgtatggatggtaatgggataggctagaagaatagaatctgcttaactctccagaaaatgaggcatgacatgagttatggccttttggtttccacatgtagacatgttcctggtcatgaggagaacatatatatatatcctttttgaagctccaaacctgggctgcccactgcttatacttcagtgggtcacgttgctgggtggaatgaagtggagaatagaaaaatgagagctcagtatgaagattcttcagtgtgtgcttatgaaacagtgattatatcccaggtcatgtgtgtgtgtgtgtgtgtgtgtgtctgtgtatgcatgtgtgtgcatgcaatgtgtgaatgcctgcctgtgtgtatgtgtatttgaatatatatgtgtatatacatacatgtgtgtgtgcatacaaatgtgtttatgtgcctgtatatacatgcctgtggggggtgggaggaagaacagagcagagagacttgtatttacagtccttcagtcagatcttacatctatagtataatctgtgagaagccttagcctttcagcatgtgtgaacatgaggatcaggtgaagagtccgaaacggcttctcagtctcattctgttcaagtgtggtgtgcatacacactcagtgcttgtgttcgtgttgtacccaaggtagagggagtccaatctgtgcccacagacacctctgagggacatttgtaaggacacagccacaacagaacaacttgtttagggagaaaagatgaaggaaaaaagaaggtcaatgaactggttagtttatttgttttaaaagactgagaagggggaagtgacttcatgtttccattagttaaatgagtcaactgtttaaccaggaatgattgtaagatttatctgtataatcaattacgtttttgagaagaaaaggaatattttatatttattctgatgttttaaactttaaatgattttgtaaaatatcttttatatgttagtattcgtgctaaaagagaaagataagttataattataaaagtatagtcatggggggcccagacaaatgtgaccattaagactctgagagttaattatgtactcagcaatgtgtatccctaacaggaaaaccacatacctcagccatgggcagagaaaggaagtgtgtattggatatgaaatggagtgtacctggattacactctgtagttcaaaaaacagcagaaacattttcattttaccaaataaaagataaaaactactaaaggctaagtaattcttagtcaacagtcctttcagtagtttactcctgctgttgttaataatctgatttttcttttagaaaagtgtatgctgttcctgtaagcatcgtgtagggcttcaaacacattccctttcttctttctttttaaaagaaaagttagacttagatttttctcttaggaaagaataaagtgtatacaatataattagaaaaataaaagatgtttacagatttttctaatctttttttcttttattcccagtccttgaataactagggatgacaaaaaaaaaaaaaaaaaaaaaaaaaaaacctgtgggtagaccactattatagaatatcaatctacctgatcttttgtgaaagccttcctaaatgagaagacagcaagacttgctctcaagcctgctcctccagctgccttccggaacccccaatctctgcaactgtttactaaaagacccagcaaggcctctggactcccacagcaaaatgcagccctcttatttgggatcctctttctccaacaaatgactctttaatctttgaacacaagttctgtgtgattttgactggtatccgccacccccaggagtgctactgccttctgggaaaacacacacacacacacacacacacacacacacacacacacacacacacacactgactctgtctgcctctcctgaggtcattcatcttctgaagctgtgcacaatttcatatcaggaacgtagcaaaattaggtgcagaatttaaactgccaaagattttcaaacacgttttctgttactgtataataagatggcaggtggtcacaagaggtagctcttgaggtgaaatgagttcgagactagcctgaggtgtgtagagtaagatcctgtctctaaacaaaacaaaccaagaaccgaaacaggccagaaagggatgtggaaggggagatgccaagaaaataaaataataagaatgacagtatatacccccatgcctgacaattggaagctgagatgaaatagctccctgtatttagagtgtagatttcccttgtgatggggactcgctggccccaccccacccttgcctgatgtccccattgctgggaaatcaggcagctaagaggaaaacaagagagaatgtctggtttgcctcaaagatggatttttacactccacatgggtttttctacatctccagacatcaggttaacccgtatgtaaattttttaggttccaatagccttaaacattaaaataaaatgccaacattattaagactgaggttaacttcaataatacacgtgcttggatcggtgcttttctttggggtgaatacgataagggtgaaatacagggacccctcccccctttttaaaaataaaatggcctatgaagacctggcaccattctatgtccggagtggggatgtgtgggagatgagaagtgtagtaccctgtgcagtacaccaacctgaaaggaaatatgtttagataattccactagtcccgggcggccgatttctcgggtgagcaactccgggtggggtgaggggctgtagatcttaagaaccagcccccagaactgacagtgggtaggtatgaggaaaacagggtgagcagccacgttaaacagaaagcagaaaggcttcgtttcattgtcctcagaagagccataggtgggtaagatacaacacaaagagaagcgagtttccaaggagcccggcaaaaccagtaggcaggagccaccgctccagcggcagccttagcaggcaaataagaaatatcttcgctttaaacgagagtgcacttcattttagctttggtttgtaccgttgggttaaaatagcaaatgacccagaaggtgcgtgctgggaggcagagctagggtttcaggaccgagctgcaggggaggagggcgtaggtgatggacagaggaggcgggacgcgggggagttggggaggcctatggagtagaaagtgggggaggggcggcgatgctgagtcccgggctgtttcaccgatccggcctgaatccgtgaactcctttccgaaccgctccggagccgcccggacacggcggtctccgaagaccgttactccagccgaaccggcagatgcgcgcgatccaggagggaaaacgagagggggagagacgggacaaaaccctgcgggtgcgcggggagggggggagggagggcccggcgaccgggctctagaaagagggagaaaaagaaccggaggatgagcccacgtgcacggtgccgcgcggtgtcgaagcgccaccttctgctggatagcggcgcagcgcgatcgcgcgcgggtttagggcgcgacgcgcccaggatgagcaggggcacccactcgcggtgcccgggtgggtgcatctgcactggggttcagtccatcgtcccgcgcccttgagtccgcgctggcgtctctcgctccgtcctgcatccgcccgggggacacgcgcagctgtgcgcactcgcggatttcttttgaaaaaataacatatttctagacaactccccccgccccccatctttgcaaactggccaggaggcggggctggaggtggggcccgtggttaataacgggagataggcggagtcgggaccagccattggctggtgggagtagtgatgtcacccatatgacaccctgataacgagttgagagagagccctcaactttttgcagaagaagcgcgcgcgcctgggagtgcttggggtccggcgcttgcggcggctgccaggagtgagagagcgagaaatcaagcgagtgagagagagagcgcgggtcccgggccgccgccgcctcctctccggtcgccgccgcagccgccgacgcagcagggaacggggccgggggggaggggggcagccgcggacgcgcgcggccaaggactttgcaacttgccggagaaggtggaggggcgggagggggaggggcgcccgcgcaggagaccgagcgcccagccccgccgcggaccatggtgcagcaggccgagagctcggaagccgagagcaacctgccccgggacgcgctggacaccgaggagggcgagttcatggcgtgcagcccggtggccctggacgagagcgacccggactggtgcaagacggcgtcgggccacatcaaacggcccatgaacgccttcatggtgtggtccaagatcgagcgcaggaagatcatggagcagtcgcccgacatgcacaacgccgagatctccaagaggctgggcaagcgctggaagatgctgaaggacagcgagaagatcccgttcatcagggaggcggagcgcctgcgcctcaagcacatggctgattatcccgactacaagtaccggccgcgcaaaaagcccaagacggacccagcggccaagcccagcgcgggccagagccccgacaagagcgcggcgggcgccaaggcagccaagggcccgggcaagaagtgcgccaagctcaaggcgcctgcgggcaaggcgggcgcgggcaaggcggcgcagccgggggactgcggcgcgggcaaggcagccaagtgcgtcttcctggacgacgacgatgaagacgacgacgaagatgacgagctgcagctacggcccaagccggacgctgacgacgacgacgacgagcccgcgcactcgcacctgctgccgccgccgacgcagcagcagccccctcagctgctgaggcgctacagcgtggccaaggtccccgccagccccacgctcagcagtgccgccgagtcccccgagggcgcgagcctgtacgacgaagtgcgcgcgggcggccggctctactacagcttcaagaacatcaccaagcagcagcctccgcccgcgcctcccgcgctgtcgcccgcgtcctcccgctgcgtgtccacctcctcatccagcggcagcagcagcggcagcggcgccgaggatgcagacgacctcatgttcgacctgagcttgaatttctcccagggcgcgcacagcgcctgcgagcagccactgggcgcgggagcggcggggaacctgtccctgtcgctggtggataaggacctggattccttcagcgagggcagcctgggttcccacttcgagttccccgactactgcacgccggagctgagcgagatgatcgcgggggactggctggaggcgaacttctccgacctggtgttcacgtattgagaggcgcagggctcctcgggaggcagtcgtggcggtcaggataaagaggatggtggggggagggggagaagatgctcatggtcagagagatgtggcgctgagaaattggaaacggtgatgaaatgttgttggagttaaagtgaaatgagtagttttaaacagattttccaagttttttttttaatttttatttttaaaaaattttttggtctccccactcttcccgtcctttatcgtgtctcaaggtagttgcacacctagtctggagttgtgatttttccccacccgtaaaaaaacgtgttttgtaatttctatttctttttcctgaaattcgtgattgcaacaaaggcagaggggaccgggcgggggaggggaggaggccccgctccggaaggcgctgtttgaagcttgtggctctttgaagtctgaaagacatcggcagaggaccctttagacggcacaactgttactctagggagttgatattttttttcttaagagatttaaaaaggaactggtgatttaaaaaaagaaaaacacaaaaagggaccattgtaacctttttattttattttcttttttggagggagaaagctgatgtcttctatgcatccgatttcttaaactgcagggagcttgaaaaaatgcagtctgtacaaacgcttacaaaaatcataactgtgaactgacttaagaccagagtttacttttcagatcaaattgtttatggttttacaaatgtgatttctacttggcaacctttttttggtaactcgttcccttatacctccttgattgaataccttacagcctagacctcagtacaaaaaggtattgaaacatttttgatacataacagacctcaatcttttttaaaaattaatatattttcaggcgtatttttgtacagtgaaaagggaacaatcttgctgtgttttttcagtaagactttcaggcacttcttcccttttgatttctttttctttttttctcttcttgtttttgtttttcctttttgtttgtttttttagcatgcaaatatgttggtacgttatgtcctggtttaaaaggattaaaaatttaaaagtaatccttgcatctaaaggccttgtggtttaaaaaaaaaaaaagcaaactttttttgtacagctatagtagagatttgttcaatatttgtaggtaaagatttattgaaaatggtgacctagacctcagagctgttcttagtttaagactgtatgtactgtatcatagtaggacctatgtatctcatcgctgtgatgtgtggacggggccccagacagaaggtttgaaactggatacgcgatttttatcaaaaagaaaaaggaaaggcacatagtttaaaattttctcattttgtgcaatataatctaaataaacagaccattgcatatttagtagcaaatggtggcgaagcagactcaatgcactgtcgaagtcaccgccggggtttttggttttttttgtgtgtgctgaagtctgtgtcttgattttaataaatcagcaggatcggatagaagctcgcatggcccttagtctctcccgggagccgcgtgttcaccgcgcagcggacgcgggtcgcggagggcggatgccgctttttggagcccttaggctgccataggttgcagcccggtgtcctcccttctcaccccgccctgcgtctccatccccgccgtgggcttcgcgctggtccgtgcctggcgagtctggagctagtgtccacagggctaggcctccgcttctggctttgggttttttctgttgttgttgttggttttttttttttttttttttaatctccacccccatccgcgggcggcatcgctgcgcgcgcgcgcgcgcgctcaatgagatacgagtggagagggccgcgcccttcagcgttatccacgcgggtggggcacgaggaaagcaaatgcgcctagagccgccttcacggtgcaggatggctttggtttctttgatggagcatttgcctcccggggcccggtccagccctcccctcccccactgccccctcccccccgccagcttgtccctcgtggtgtcccgcgcgcaagcccaactccccagggccgcgacgcacgcgaccgaggagcccttcagcagtgaattgaaactcggtgcccaacagcccgactccagacccacagaaaccattacggcgcgggcgctgaccgcggggacttgaccagtaggaatccaggtcggtgccccacgcaagacaggcactgcagatagagagctcgccctcacggagcagcgcgatctcatagcgcgtgggtggggcggcgacccggtgtggctttttcgggcttccctcgcccacccctccccccacagcgctctgctgtgagccacgcggggacctttaagccgcgaataatttcaccagcggtttactggggacagattctgaagcctaaggaaaaggcattctgagtgtcttgagttcttaacatttgcatgtgttcccgtttcccgtcgggcgttttccatggtgaggaaggaacttttaaataaattagaaaaggagtgaggatctggcttcagaatggaagcatagctgcaatttgtattttaaaattatgtggccgagtttcttggtaggaaaagaagagacagttcttggttggagatcaggaaaaaaagaaatcttttctttctttctttctttttttttttttttaaatcccagttagaactcaggaaaggcgcttgaatgcgcttttaacaatatttaaagcggtttcgacgaatgcattgtgaagaccattcccagtgaactctattgaatgtctaatacacaaggtattccagctactggccaggcttcaataaaaggttagctgcattttttttcctcctaagtaagtcttatttttaactgagcattgacagtatcttaaaatggtaacgtgggcgtgggcgttgtgtgcatggcagtctagccggttgggtaccctgctcctgtacctagttcacagactcgagtgcattttttttggcgagatttccatctttgaagaaacaaaaaaacaaaaacacctgaaccagcgttctcttattctttaagctgtggaaataatttccagtttctacattctcgatatgcatccttattaaaaagataatacgaatgaaaggcagtgtgcttaaagtgtgctttgcaaatacatgttatgaatgactacggtcactgggcaaattatttgtagaatgattagcctttagctagaaaaaaaaatcattgcagctcttttgggcctggatggttctttttaatgttaatggaggggaagtgatttaaatatgcatgctcttagcagtcaggatctgacttagttgttttgagagaaaaaaaaaatcaaaaggcaaggtctactttttttctctgggaattgaaaccacaatcatcttgatactagaacagtgtaagaaatggacatttgttcttcacttcagaattcaaatgagttttgcccaaggaatctgggaaatgaggcaaataagttgctcaattttcaagtagtcattcaatagaaatatactccatcactcggctttcttattctctgatggggtattctgtatagtctcactgttttctcctaatgggcatatgtatctttgtggacacttggaagagaggttttcttgtactctctcatttctagaatctttatactctttttcctgcaaggttctctgcttttaacagatttctgaggcaactatatttgtgcttttttcttatgtaggaagaccagcgaaactagcttactgagttgtcgattttatcagtagataaagaaactttgtttattacagtttcagggaaggtttttcaggatatttctcagttattctaagggccaaattttatataaaaaaaaaaaaaaacttcattaggaatgtcagtttcagataccctttgtatagcctgtggcctgcaagcacgacaggactgagccttacatgtgtccgaacaggaattcataagtccccaaagtaaacgtctccatgtaacgattcttgacgtgtttctctgagagttggcttattttgattatcaattctttctcactgtccattcctattgatttatcctgccatatctctttgggtttgatgagctcaacattttttgctctttgataacaactcaggttttggtttggggtttttcatgccccctttgtgtgttgcttatgttttccaccacagtataaaagtactgaagccaagccacttcccattcattcctttactgctgcctccctttccccaactcccaactcctaacacaccttcatttttttcccatcgtcttcttcttcttctttttttttaacactacctagatgcgttagctgcctgattagtttatctattccatgtggatgcagtgagtttataagagaatttcacaaacaagtagttttttagtgaacttaaacagaattttaaaggagacctatttttatactcaataaaagcacaaaacgtgcataaaatatagcatggcgtacaaagggaaatccactcataacgttccatgtatagaagtaataattttcttggatagcgatattctttgaagacccagtgcctgtctgcctgtgcccagacagggtggtttccacacactgggaacttccggttgctggcacttgacaaacacagttcaccacagccacaaagagcaataggtaggagctgaggtgtgcctcctgatgagcagtcagccactaggcaacctggatgtgcccatgtggaggctccagcctcactgtttgatcaaacttcttttatgtagtctcttctgtgaaaaaaaaaaaaaaaaaaggaaaaaaaaaaaaagaccaaacaaagcaataggacaagtttgaaaatgcatttgaacataggatttcctccagggtcctcaaagagatttaaaaaaaaacaacaacaacaaaaaaaacgtgacacttaagtttagtaggcacattacattcccctccccttcaaaaacagaacgcctggaaataatcaagacatagcgtaaaaagaattttgatcaaatggatattgacaaagggccctcgatcccatttctcttcacccagcttgtgttcaaaaaccttatgcctcgtcccctgaatcacacagggagaagcgtcctatgccattgtcatggactccccactttgtctacttttgctcttgtacatatgttgtgggtatcagttgttcccatttgttctgtaacacccttgtttgaatggactgttttgaaacggaggcctgtgtctcaggtatgggacacctagtggtcgtggcaacccatcccgtgatgctttgtttcccgggacagagccacctgaagtctgagagtagttatcagcatggcactgttaacaagtgttctgttttccaaggccgagaaaaaaagaaaaagaaaaaaggaaaaaaaaaaaagcaactttcacagccgctccaggtttgggagaggaatagctggaaagcccttttgtttagaagtctgagtgggttatggggggacttttatagagtttgcatgccagcgcaggacctgttgctgtcagacagagagaaggagaagctacctgaggcagtgcgctgggggactacgtaagtgtcccgtagcactagggcagcaaatgcatggtgaagtcatgtcttctggtagaggttatctagcatgcagagtgtagtgtgttgaaactgtatgacgttgctgtatcaaagttgtaaaattaagcattatttattgaaaactatgtatttttttgtaaaaacctgatcacacaagagagtatcagtggcttgtgctttgtgcttcaatcaaaccagcttcgtgaccgccctccttggaatgcagtgttaatgctcagggttgaattcatacactccaatgtctctttttgcaggagtttttcacagaggaatacatttgttcaaaagaccaataaaaatcgtgtgatcaatctccacatgtggcttttatgtgacttttttgttttgtttttgattttttttttttttttgttttgttttgttttttgtttatctttcccactttgcattgggtaactactgtgtgactcctaaagtgttgtctcgaagctgagagatttgaaaagtcttggtgtctcagcatccaaccaggacccacagcttgggcaggactggggccctcaggaagtgatgcttagggcaggctgcgagctgcccacagtggaataagcatggtgatcgtgtcttggtatttttaactggccaatagagtaaataaaaagcataggcaaagtatagaggggtaggttagcctgtttgtcagagttagaggatgaagggattattcaggggcagttgctgatgttgaatccaatgccagcaaactccattcctcagtgtcttttttttttcccctctataagcaatttacattgtaaatgtattttgacatagaaaccattctgtattgaaactcttgctataagatgtttttatgaaagcctgtaagtggtccttggaattattatcagatttttttaaagatgtgtttacatggtgagtgtttgttgcatattaattaaatttggttttgtagaaacatctgtgtcgtatcatgacggatctctatgggcacggcttacacactcacatgcgtggctcacacacccacttctgggcccctggtaagaccaatgtcaactttaagcaaaagaacaaatacccagctccatgtgttggacagctctctggtttttatataagacatttttacttcatagatgactttcaaagggtgtcaccctttcataggatttgacttttattttgaaagaaaacaagatagactacatacagcctttcatcttaaagtagatgattttttttgtaagaattcaacaaataaattcattgacatttctggctaaatttctattgataagactttttttttttttcctatgcttttgaacacgataaaatctcccagcagatgtagaatgtactgcagggtgggtgggggttgcctgtcacacaccatgactattccttcacataaccactgtaccaactttgaaattggctggtaactacagctgggaaagccccctccctaccagagtgtaaacaattacaagaattgaggaacttggtgaacttgaggtagccaatccaatttttgacatcagtcaaagcactaatttcaatagaattatttcttttaatactccagggtcaacaggaaaagaacgaggtcccagggaaacattctgccatgttgtacattatctgctagggcccaggacaaagtttatggtgacctgtgaacacacagctgcactgaatctaaggggtggcatatagtcatcagacaatgtggtccctcagggatggggatgcagctcatttgctatggtgtttgcctgatgtacacaacattcttggtttggtccccaacattgcataaactgggcatgatatcacttgcctgcaatcctaacacttgggaaggcagcggcaggagaaccagtcaagtcaatctgaagatagtaggcgccagattcaagtcagaccctttggatccccttttctaggaagctcaaccagctgtctttctgacttcatacacccctgcctgaaggacgttccattctctacctcctccttgaacaaatgcccctccttcctgggaccccagagagaaggcttgctggctacctgcctctggagcgaagctgctctgctctgggcccaagagttgagggtgaggacaaacaactcaaaagttggtgctttgctggccagggttgagttggggaaatggggaggaagtaggaagggaagactgtaacctgaaatgtcagagtccagacaccaagaagagtggagaaagcagagaaatcatccaagaagcatcctgagcctacagttagacagagaaaagtcccagacaagggggagcccccttgacgccaccctttagttaggctgaggtcactgctagctcttgaagttcactaggcatctgttaattcactccacacatacacacttaatttttgctttgaatggcaatataatcaagcaaaaatgaatccactcccttggggggtgcagtttgcactaagatatcaatggaagccccccagaatgaggcctggtagtgggtatggcgtgtgatatcagcttcctttgtccttagtccagcaaacatgtacacaggccttgctgtcataaagaaaggcaaagggattcctgtgtccttactggtcaccacagctgattatagttccaggtttggaagaacctaagttattcatctttccccatatatgtggccatacatctatagccatatttttcccgggatccttgagaagatgtacatggagtttaagcagctgaagcactaggaaggcaggtaacacacctaacacaccggggagtacacggagggagttaccaaaactcacactaagttttcctgcactcacaaactggatattgggctgccctctttacattttagatttgtttatgagacacttcctccttgagacatttttggggacttcaaggtggttcacagagttaaaggcatttgctgtgcctgagtggggtttaatcctcagaatccacagaaaggagagaaccagctttacaaagctgttctctgtccctgccacacatatcacacacacacacacacacacacacaactatggtgtgtaatcaacaaaccaactggaatgactgctaagctttctgctcagacagaacctttgttgcttcctattctagaaatttctccacccaagtgctcaaccgcctggcttcccctgtacctctgggtttcaaagagtggcatcaacacaacgaactcctcaaatactgtttgttcctccttccctcctgagagtttggtttttagtttgctaaacacataggttataagtataagtagacatgtagaggggtgagttgagaacatgaagccagagtcacaaggaatgtgaagagatgaagaaagagaaagaggaaggaaggggagtaagaaaggtaaaaaagaaaaaagaaaggttaatttcacagggacactatagaaagcattcaaagaactcacagccagagactgccttgtgttgagcgttgagatacgcatctgaattcaaatcatccccagctcatctctgtgttgtgtcatattgtgaaactcaggcttcaatgctagagaggctaagtcatcagaaaaagctccagtcgggctcatcctgtcatttacaagaaagcaggaaagtatgaaatcctgtcctcagtcattcacctcccagttctaagcagaactgagttctggggagaccactttgccgaactgctcttccctcaggaatgctttcctaacacaattatgtttggtccaagctctagagccttttgatttgtaatcagatagggtgaacattttcttctgtctggtgcctggggacttctcctgagcaggcaatcttcatcttcatatagaccagagttcaatccagtgcagagacagctagactgattcaaagagtttattgaaattgagagtttgagcctagtggaccaggagttatagggtgtctgtatggagtgagtagagggccttggggaggaggagtagcctgaaacaatggatgtttcctagaactgatccagactgtaggtccaccaccacctaggatacagtgagacagtgttctgcactagggtaaagagaagatggattaagagagttactcaaagaaaggtgagtatgagatgcaaggagaataatatttgattgcattctggttaagaaaaggggatcagggaggagagaggtgtagtcagtaaccccaacatccatagggtagaagaggcggtggcagaggactgctgaagggatggtgtgaagagaagcctggacttagtgtctttggctctttctgattagatcatgtgggtgcaggccaagtcttgagcctgtgatcttggggcctcggtacagctgggagtgagagcctaaggtgacctgcagccttagaagaataaactccacagtctgaagaaggtggttttaactcttcttctttctaacctaaagggccattcaggaacacgagatcctccagtggcagcttctcctggagctcccgccaaagtcagtcctgggggcggggcaggggtaggactgtagtgtgctggctggccagactcactggcctgcaccccaaacctatgcaccaaacccaccaagtggacagggagaataatgggattcccacaagctccccagaaccagggtactggaaagataggtaggtgtggataactgagctacaaaaccagtcaaaaagagacagaaacaagactcctggtttgggctcagagcctgacaacagggaagagctgagcatctctgacttctttgtatttctttcctcataagggggcaaagagcaactaactatatgcagttaaatgcaggggcaggagtctgctctcccttgtacagtgggttttcagccatagttttaggtttcagtaatgtctgatggttccattcaccggcttaaaaaaataaccaagatctctaaatccaccatggaatgagtggggtgtcagtattcagggcctgtatggtaactcattacagagagtggagagtagtccttctgatactccgtggagggacagaagcagcagcatgaacctctgcagctatctgtcaataaagcatggagacgtagaggaccttaaaaaagctagagtcagaaataatgtttgaacatctttaaacaactccatcgtgacaaaacttctgaaagcctttgaaatctgtgagcaacttcatggaaagagcatgccttgatgactgggaaagtcccttgcactgcagtggtcttcagagaggt

SEQ ID NO: 282 - DNA, 2452 bp, Mus musculus
agcgcgcgcgcctgggagtgcttggggtccggcgcttgcggcggctgccaggagtgagagagcgagaaatcaagcgagtgagagagagagcgcgggtcccgggccgccgccgcctcctctccggtcgccgccgcagccgccgacgcagcagggaacggggccgggggggaggggggcagccgcggacgcgcgcggccaaggactttgcaacttgccggagaaggtggaggggcgggagggggaggggcgcccgcgcaggagaccgagcgcccagccccgccgcggaccatggtgcagcaggccgagagctcggaagccgagagcaacctgccccgggacgcgctggacaccgaggagggcgagttcatggcgtgcagcccggtggccctggacgagagcgacccggactggtgcaagacggcgtcgggccacatcaaacggcccatgaacgccttcatggtgtggtccaagatcgagcgcaggaagatcatggagcagtcgcccgacatgcacaacgccgagatctccaagaggctgggcaagcgctggaagatgctgaaggacagcgagaagatcccgttcatcagggaggcggagcgcctgcgcctcaagcacatggctgattatcccgactacaagtaccggccgcgcaaaaagcccaagacggacccagcggccaagcccagcgcgggccagagccccgacaagagcgcggcgggcgccaaggcagccaagggcccgggcaagaagtgcgccaagctcaaggcgcctgcgggcaaggcgggcgcgggcaaggcggcgcagccgggggactgcggcgcgggcaaggcagccaagtgcgtcttcctggacgacgacgatgaagacgacgacgaagatgacgagctgcagctacggcccaagccggacgctgacgacgacgacgacgagcccgcgcactcgcacctgctgccgccgccgacgcagcagcagccccctcagctgctgaggcgctacagcgtggccaaggtccccgccagccccacgctcagcagtgccgccgagtcccccgagggcgcgagcctgtacgacgaagtgcgcgcgggcggccggctctactacagcttcaagaacatcaccaagcagcagcctccgcccgcgcctcccgcgctgtcgcccgcgtcctcccgctgcgtgtccacctcctcatccagcggcagcagcagcggcagcggcgccgaggatgcagacgacctcatgttcgacctgagcttgaatttctcccagggcgcgcacagcgcctgcgagcagccactgggcgcgggagcggcggggaacctgtccctgtcgctggtggataaggacctggattccttcagcgagggcagcctgggttcccacttcgagttccccgactactgcacgccggagctgagcgagatgatcgcgggggactggctggaggcgaacttctccgacctggtgttcacgtattgagaggcgcagggctcctcgggaggcagtcgtggcggtcaggataaagaggatggtggggggagggggagaagatgctcatggtcagagagatgtggcgctgagaaattggaaacggtgatgaaatgttgttggagttaaagtgaaatgagtagttttaaacagattttccaagttttttttttaatttttatttttaaaaaattttttggtctccccactcttcccgtcctttatcgtgtctcaaggtagttgcacacctagtctggagttgtgatttttccccacccgtaaaaaaacgtgttttgtaatttctatttctttttcctgaaattcgtgattgcaacaaaggcagaggggaccgggcgggggaggggaggaggccccgctccggaaggcgctgtttgaagcttgtggctctttgaagtctgaaagacatcggcagaggaccctttagacggcacaactgttactctagggagttgatattttttttcttaagagatttaaaaaggaactggtgatttaaaaaaagaaaaacacaaaaagggaccattgtaacctttttattttattttcttttttggagggagaaagctgatgtcttctatgcatccgatttcttaaactgcagggagcttgaaaaaatgcagtctgtacaaacgcttacaaaaatcataactgtgaactgacttaagaccagagtttacttttcagatcaaattgtttatggttttacaaatgtgatttctacttggcaacctttttttggtaactcgttcccttatacctccttgattgaataccttacagcctagacctcagtacaaaaaggtattgaaacatttttgatacataacagacctcaatcttttttaaaaattaatatattttcaggcgtatttttgtacagtgaaaagggaacaatcttgctgtgttttttcagtaagactttcaggcacttcttcccttttgattt

SEQ ID NO: 283 - protein, 460 aa, Mus musculus
ERERGSRAAAASSPVAAAAADAAGNGAGGEGGSRGRARPRTLQLAGEGGGAGGGGAPAQETERPAPPRTMVQQAESSEAESNLPRDALDTEEGEFMACSPVDESDPDWCKTASGHIKRPMNAFMVWSKIERRKIMEQSPDMHNAEISKRLGKRWKMLKDSEKIPFIREAERLRLKHMADYPDYKYRPRKKPKTDPAAKPSAGQSPDKSAAGAKAAKGPGKKCAKLKAPAGKAGAGKAAQPGDCGAGKAAKCVFLDDDDEDDDEDDELQLRPKPDADDDDDEPAHSHLLPPPTQQQPPQLLRRYSVAKVPDTLSSAAESPEGASLYDEVRAGGRLYYSFKNITKQQPPPAPPALSPASSRCVSTSSSSGSSSGSGAEDADDLMFDLSLNFSQGAHSACEQPLGAGAAGNLSLSLVDKDLDSFSEGSLGSHFEFPDYCTPELSEMIAGDWLEANFSDLVFTY

SEQ ID NO: 284 - DNA, 21239 bp, Homo sapiens
  misc_feature (1)...(21239): n = A,T,C or G
ccctcaccaactcttggggacttggtgtgggagtcaagactcatcagcgccaagctgtgggctttcaatttggtggggagtgcagaggagattgggacacacagagactggagcaaaactctagcctgaacacacggaggctgggccctggccagagctgccctggaaggagagcgagcagtggcctctcccacagtcgggtggtgcaaacactccggatatgtccctgaagcagaggcatgtgatggaaggaagtggaacagagccaccctggaatgaccttgtcagagcaggccttgttgtaagtgactatatcaagggcgtcaagcaagggtgttcacacctaggaagggcacccaaaatggaacctcaaggatcatctggagacgcaattccccacaacagagaaggtggccctgctgcgatgggttcattcttataataacccatcaaggaggcccagcagctggaatcctggcatgtcaaggggcattcagcagccaagtgagaagcacacagcatcggctacatgaagatagactttgcccctttctcttctgagcccttcccatctcctggttccccagcagccagaaggcaggacggggaggcaggagtgtaaaacaccagaactgccaccttgtctctaattcacagtcagcccaagctagacctgaggggggatctctaggctggtgggaagagaatcacagagctgtgtcctgatcacactgcacttcatccagcctgtcaagtgcaccatttacacacccaagcacagatccaaatggtactcgggaccaaaggaaaatcatgttaatttttattgtaacatggactctccgctgctgtgggagaaaaaaataatgaggaatctgatactcacccaggttaaaagagcattactgagactgaagtaggctgtggatatctgcaggcaacttggattgctttatgtgcctttcttacattccacatttctatgggaaatatgtgctgccttcaaatggaggaagagaaaacaataaataccacaaagtaccaaagtcacaactaaataactatactttaacatataataaacccacagacttaagagaatgaaaccaaaataattttccctagtttacgattctgtagcagtgacatttttcgtcctggaaaagctacgtaaggtccagcgcagaagtgaccttggaagtcacctagtccaaaatgttcgtgctagaggtgaggattttaagggccaaggtgatcaacccctgttcctaagatcacgtggctgatttatgttaggatgggggcaggagacagtctccctggctcagacccctcttccctcacaggtgtgtctctctaaggcactactcacctcttagtagaagcctgggtcctcttgccacccatcctcccctcctcccccttgtctgcaaacgcccttcgattttgcacagcagctaaaagctaccctaatgatgaccacaaattggtagaatttttagtgaatgccctctccaaggaaaggtcactgtatttcttgttcatgttatgattacttagaatttaatggttacctgtgcttcacacatctctgcctataccttactttatttggaataacaaaagtaatgtaagtgttttcaaagctgacagacagagacagagtacagaaagagctattgatgcatcgagggccagaaagaaaaacaacagcagacacctaagttcaagagtcaattacagcaaaatgtagttgattacagggctcatgggtcgcggggagtgggtaaagcaacctggccacacagcttggtgatttagaaagagtcctggctagggctttccctcagcctatcaaggtggaggggagacgctgcacctgccaaagccgatgattccctgttcccggtgaggactatccacagacaccctcctcctgcacttgtgcttatcaaatcccagaaatctaccggacacgtgtttgcctgagttaccagctctccccatcccctcttgtctgtatcatcgaaaacaatgacacattcatagctattcacatggatgttttctctagctaagaagtgattaagacaaacaaatcaggataatagccatgttttgaagaaaccagatttggcaaattttaaaattgtgctttcaaaattgactattcatttctttttatattacacttccaaacacacacatacacacttaacaatcacacatttggaaccatacatgtcttctttggtgtataagacaaagatactgatagaaagggagcaatgtctccaggagacactggcccctctcccttcatgtgtagactgcaactctaggacttgctctccagcactggtgcaggctccgcctctgtctttgatttagatgggagagggcaggagccatctccccaccccagcccctaaagccccccactctcttttttggagctaagagagcaggccacactggacgatagtgctgcttgctcaacaaaaaaaataactgttttgggggaaattatttaacttcatttaaaaattccctgagttttctagttaaatgtcttttttagagcatattcctcccactaaaaaatggttgaataaatatatttttaataaaaataaggtttgtttaaactgtaaaagataggaagttctagccaatgcctggttaacaggaacagtgtgaacacgtgaaacagtgtgatctgaaaccacagacatccctcttggtgttagctccaatgttgcatgtgtatattctgtgtgtgtacatctgtgtgtgtgtgtgtgtgttcatttgtgtgctgggtcatgatgtaaaaatccatttcatatgtcagatcatagtcaaaataagtttgaagcccctgccctgtgctatcctgccctgctgatactctgtgttttccttaattgtgacaaagatgaaactacagaggcaaaacgagaagagtcatgccttgcttgcattgcaaagggacgtggattttgtcctaatggtgaagggcatcctgagcatgacgctggcaagtcccatggtccctgttgcatgttggaatgaatagtctgtctgcagagtggaaacagggacatcagtttggtgtccattactaaaaaatgtgtaaagcccagaggaaaactgaaacatacacactgatggtcaaaacatgcaggaggaagtgaactcaggagtgactcgggtaggagaattgactgagcttactggggtatgtgagcaaatatgaaaatcccttcataacttacacaatagttacggtatgccaggaaccctttcaggcacagaagaagaaatattaaaataataaagactacatttgtaaacgttctactgtgcgcagcactgttctaagcacttcatatgtatttaatcattatagcaattctaacaaatcaagcaggacctggactgtgtctctgcacacatgagtgtgtgtgtgtgtgtgcgcgtgcacgcacatgatggaatggttactggtatcctattttatagactggaaaacgaaggcacaggataagttaaataacttgtgtaaaagacactatcaagaaaatgagaaaacaagccacagactaggggaagttatttgcaaaagacatgtctgataaaagactgttacccaaaatatacaaagaagtcttaaagcttcacaataagcacatgaaaaacctgatttaaaaaaaatgggccaaaaacctgaagagatatatcactaaagaagatatactgagggcaagtaaatatttggaaagacagtccatctcatatgcctagggaaatgtaaattacaacaaaaatgagatagcacttcagaccgagtagaatggctacaatctaaaatagtgacaacagcaaattctgacgaagatgtagaatagtagaaactctcattcgttgctgttgggaatgcaaaatgggacagccactttggaagacagtttgaaagtttcttatgaaattatacaacctcttaccacacgatagagcagtatcactctttgatatttacccaagcaagttgaacacttacatctacacacaaagctgcacaaggatgcttgtaacagattttattcatcattgccaaaacatggaagcagccatgatgtccttctgtaggaggatggataaactgtggtatactcagacaatggaatgttatgtattgccaaaaagaaatgagctatgaagtcataaaaagacatggaagaacataaaatgcatattgttaagttaaggaagccaatctgaaaaagctacatactgtatgattccatatatttgacattctggaaaaggcaaaactattgccatagtaaaataatcagttgttgccaagggcttggaggggtgaaggatgaataggtgggtggaggccagatgattagggccatgaaaataatctgcatgacactataatgatggatacctgccattatacatttatccaaatccacagaatgtacaacaccaagagtgagcctaatgtggactacgcatgttggatgattatgatgtgtcattgtggatgcactgatcgtaacacatgtaccaccgagtgggggtggttgtgtatgtgtggggatagacactatgtggaaggctctgcattttccattcatgtttgctgtgaacctcaaactgctctagaaaataaagtctatttaaaaaaatagaatacatatctcatatgaataatttcaaaagacgtgaattttggaggcagtacgtttgtggaattatctgggcattgataactaaaagtcaagcgctccatgatgagagccacgcgggaaaaagaaaagatagtggaaccagaattttcaatccagggcagaacgcttctgagccgtaactctgaacacctaagccagtgtttttcaaacttcagtggtgcctcattaatagtgggttttaactagcatttacagaaatggaatggaatggaatagaataaaaaagagtatgaattgcacataaaagagagatactgatttgtgacgctttggtttctgctttatatgtgtatagcatgagtactgggtcatgatgtaaaaaggtgttttataaaataggtcatgatcaaaataaatttccaagccgctgccctgtgctgtactgcccaactgctctggctttcatggatcacactctgcagtggtcaattcagagaataaatgagtgaaaagcttaacaacattattttagctattgaaacatgttctgatgagccaaacagggtaacagcatccactggttcattgtgtgtgtgtgtgtgtgtgtgtgtgtgtgtgttttcaaggtaggattgttcgatctatactcattaccaggtctgaggaacacttaagaaggaataagaaggaatgtccagtagacagaatataaccagatccaaattcaagatttgaggctgaagctgagataaatagatacagctaacaataaggagtgaactcatttcaggagaataggtaaagggagaaaaaaggaaaggatcctaccttataacttcatttcagagatggggaatgcatgtggttgcaatacttctaaaaatggtggtcaatccatcagataagtcaaatatttacccagtgatatttttagcatattatttgcttagaaaaatgcttctttcctaagaaaaagggacacttcttactctggctgtgttataattttgagagatatcgtgaaatatctcatctctttatgtaatagtccttttacgtgacattttctttgtaaagatggaattatgaaaaggtaaaaatcaccataaaaatagtcatttgtgcctctaatcagatgtgactcttaagattctgaacattatgtatccaacaatgtttatggttaacaaacaaactacatatcttgcttataaataagtatatagacagacacacacaaaaatgagtgaatattggctctaaaaagataaccaatgatcctaattatgatatacattcagtggcttaaaaaacagtagacctatttccattttactaaattaggttttcaagaggtgcattattaaaggctatattttctatttggtagcctaaaatttctctaaatagttggttactgttaatggcgcaaacatctgttttcagaagtaactattattcctgtaagaagcatgcgtactctcaaacatgttcccatatttttttttaaatgctatacttatttaaaaattttcccttagggagcaaaaataaagtatacagattatcatttttttcattcctcactcgactacgtctaacaacattaagtatgtggggtgagtccatgctacaaaatagcaatctagttaatctcttgtgaaaattgcctggcctctcctacatgacaggggggattcagctgtagcacccgcctgtgccgccttcagtgcctgctttagcaatcccaatctttgctttatcttctccaacaaacggctcatgttgccttgaacagaaattatatttcttgttcgaaagagcagattttaacttttatttcctctaaaaagatcgcagcgctatgagaataaaatctattatttttcactcctactatattcagatcattctcattttaaagctaagcatgatttttgctatagcgtaaagatagcaaatcaatatggaatttgccaaagattttcaaatgcattctctttccgaggcccaaatggtaggtgccctcacactttgcaagcaaataatgaagctgagctgaaatatttcaatccttttctctagagtgtggatttgtcctgcagttgtggggaggtgggtgtaggttcaccttgtgctccaccccaccctccctcccgtggtgttcccaatagctgaaaaacgtgtgagctgtaagagaaaaacaagacctagtgctagccgtgcgggagtgaagatgagttttcacacactgccttggattttatacatctccagactttaagtcacccagtatgaatgactgtaaattcttttggttcctatggccctggaaagaataaattgccagcattatcaagatttaagttggtctgaatattccaagtattcgatgcagtgtttttctttaggatgagtcggggaagtgggggacgggggcgggaatggcttatcgcaatggcggtaattttttcaaatcatgatctgtgtaaaacacggtattattttatgatattagaatcctcagagaagatccaatacttaagaaatgtagtattaattgcaggagggcacctgaaaggaagcagattcggataattttcccagtcctacacggctgatttctctggtgaagggatccgggcagtgtcttaggaactgctcaaagttcccagatacccagtgctggggggtgtggagaaggcgagggtggcgacagaccatacctatgaagcggtgattttctttaattgcccccagaatatccgtagaggtagtagggactcaataaagaaacacaaaggagacgaacacggcacgatcgccggggtccgcggctgctctgcgaggcccagcgcgccccaggtcgcggctccccggccgccagcgcacctttccatctccagggaaaatatttagacgggaaactcgagtgcaccttattttctctttggtttatgagtgacccagaaggcttctagctcacaatcgcacgatttcaggacgaggctgccggagaagcgctggcgaccgaggatgggggaaggacaaagaggaagaggaggcctgggaaggagaaaggagcggcggaggggcggggagaggacggggcggggagaggaggggcggggagcagagggagaagggaaggagggcgccgggcccctcgcagggacgccgggcggggcgcgggcttgctggagcctgcgggacccagagcccgctccggagccagccctgggagtggccagcttgaacccgagggccccgcagaccgttactccggcccccgcccggggcggggcgcgcgggggcgcggcgcagcccaacccgcacagccgcgtccccaaacaccaccgaggagggaaaacagacggagaaaaaggacaaaacagaaaaatgcaaaacgggggagggagctcaccgcctctcgagctttaaattgatttctttgccttacaaaaagggagaaagggaaaaggagagcagagcccacgtgccgggaaggttgctgtcttcaagcgccaccttccgtcggccagggccgccgcggggctaccgggcgggctcggggcggcgacccgggggagcggccgagccccgcgaggggctcgccggggagcagctgcgcccaccccggggcaggccgggcgcggctgaccgcgagccgggcggaggccgccgtctcaggctgggcgcgtgcccgagtgtgtgcacccgggggagtgagcgcgcgccgtccgctgtcgccgtcgggcctcccggggactgggcacaaaggcgcgcggggcctctcccgggacccggtcctcggttagcgccggcgcccgaaccatcccggttcgccccgggccgcccgctccccgtggtgccgcgcgccgcttccgagcatcccgggaacaggcgcatctgtgcacacacgcggattttttaaaaataacatatttctagacatgcctcctctccccccacccccatctttgcaaagcagcccggagggcggggtggaggggcggggcctccgagttaataaaggaagatgggcggagccggcccccagccattggctagctgggggagtgatgtcacccatatgacaccctgataactagttgagagagagacctcaactttttgcagaaggagcgcgcgcgcctgggagagctcggggtccggcgcttgcggtaggagccacgagccggagagaggggtcccgggctgcctcgaccgccgtcgccaccgcctctacctgtcgcgaccgcagctcccaccgcgccggcggccgtcgccgccgaannnnnnnnnnnnnnnnnnnnnnnnnnnnnnnnnnnnnnnnnnnnnnnnnnnnnnnnnnnnnnnnnnnnnnnnnnnnnnnnnnnnnnnnnnnnnnnnnnnnnnnnnnnnnnnnnnnnnnnnnnnnnnnnnnnnnnnnnnnnnnnnnnnnnnnnnnnnnnnnnnnnnnnnnnnnnnnnnnnnnnnnnnnnnnnnnnnnnnnnnnnnnnnnnnnnnnnnnnnnnnnnnnnnnnnnnnnnnnnnnnnnnnnnnnnnnnnnnnnnnnnnnnnnnnnnnnnnnnnnnnnnnnnnnnnnnnnnnnnnnnnnnnnnnnnnnnnnnnnnnnnnnnnnnnnnnnnnnnnnnnnnnnnnnnnnnnnnnnnnnnnnnnnnnnnnnnnnnnnnnnnnnnnnnnnnnnnnnnnnnnnnnnnnnnnnnnnnnnnnnnnnnnnnnnnnnnnnnnnnnnnnnnnnnnnnnnnnnnnnnnnnnnnnnnnnnnnnnnnnnnnnnnnnnnnnnnnnnnnnnnnnnnnnnnnnnnnnnnnnnnnnnnnnnnnnnnnnnnnnnnnnnnnnnnnnnnnnnnnnnnnnnnnnnnnnnnnnnnnnnnnnnnnnnnnnnnnnnnnnnnnnnnnnnnnnnnnnnnnnnnnnnnnnnnnnnnnnnnnnnnnnnnnnnnnnnnnnnnnnnnnnnnnnnnnnnnnnnnnnnnnnnnnnnnnnnnnnnnnnnnnnnnnnnnnnnnnnnnnnnnnnnnnnnnnnnnnnnnnnnnnnnnnnnnnnnnnnnnnnnnnnnnnnnnnnnnnnnnnnnnnnnnnnnnnnnnnnnnnnnnnnnnnnnnnnnnnnnnnnnnnnnnnnnnnnnnnnnnnnnnnnnnnnnnnnnnnnnnnnnnnnnnnnnnnnnnnnnnnnnnnnnnnnnnnnnnnnnnnnnnnnnnnnnnnnnnnnnnnnnnnnnnnnnnnnnnnnnnnnnnnnnnnnnnnnnnnnnnnnnnnnnnnnnnnnnnnnnnnnnnnnnnnnnnncgacgacgacgacgacgacgacgagctgcagctgcagatcaaacaggagccggacgaggaggacgaggaaccaccgcaccagcagctcctgcagccgccggggcagcagccgtcgcagctgctgagacgctacaacgtcgccaaagtgcccgccagccctacgctgagcagctcggcggagtcccccgagggagcgagcctctacgacgaggtgcgggccggcgcgacctcgggcgccgggggcggcagccgcctctactacagcttcaagaacatcaccaagcagcacccgccgccgctcgcgcagcccgcgctgtcgcccgcgtcctcgcgctcggtgtccacctcctcgtccagcagcagcggcagcagcagcggcagcagcggcgaggacgccgacgacctgatgttcgacctgagcttgaatttctctcaaagcgcgcacagcgccagcgagcagcagctggggggcggcgcggcggccgggaacctgtccctgtcgctggtggataaggatttggattcgttcagcgagggcagcctgggctcccacttcgagttccccgactactgcacgccggagctgagcgagatgatcgcgggggactggctggaggcgaacttctccgacctggtgttcacatattgaaaggcgcccgctgctcgctctttctctcggagggtgcagagctgggttccttgggaggaagttgtagtggtgatgatgatgatgataatgatgatgatgatggtggtgttgatggtggcggtggtagggtggaggggagagaagaagatgctgatgatattgataagatgtcgtgacgcaaagaaattggaaaacatgatgaaaattttggtggagttaaagtgaaatgagtagtttttaaacatttttcctgtcctttttttgtcccccctcccttcctttatcgtgtctcaaggtagttgcatacctagtctggagttgtgattattttcccaaaaaatgtgtttttgtaattactatttctttttcctgaaattcgtgattgcaacaaaggcagagggggcggggcgggggaggggaggtaggacccgctccggaaggcgctgtttgaagcttgtcggtctttgaagtctggaagacgtctgcagaggacccttttggcagcacaactgttactctagggagttggtggagatatttttttttcttaagagaacttaaagaactggtgatttttttttaacaaaaaaagggaccattgcaacttttgttaattaaatttttttttttttttttttttttttttttttggagggagaaaactgatgtcttctatgcatccgattcttaacaaaactgcagggagcttgaaaaaatgcagactgtacaaacgcttacaaaaaaaaaaactgtgaactgacttaagatcagagtttacttttcagatcaaattgtttatggttttacaaatgtgatttctacttgccaactttttttttgtaacttgttcccttatacctccttgattgaataccagacagcctagacctcagtacaaaaggtattgaaacatttttgatacataacagacctcagtcttttttaaaaattaatatattttcaggcgtatttttgtacagtgaaaagggaacattcttgctgtgttttttcagtaagactttcaggcacttcttcccttttgatttcttttttttcctctgttttttagcatgcaagtatgttggtacgttatgtcctggtttaaaaaggattaaaattttaaaataatccttgcatctaaaggccttgtggtttaaaaaaaaaaagcaaacttttttttgtacagctatagtagagatttgttcaatatttgtaggtaaagatttattgaaaatggtgatatagacctcagagctgttatcttagtttaaagattgtatatgtactgtactatagtaggactttatgtatctcatacgctgtgatgtggatggggccccagatggaaggtttgaaactggattctcgatttttagcaaaaaagaaaaaaaaaaggcacatagtttaaaaagtttctcattttgtgcaatataatctaaataaagtacagaccatctgcatattttgtagcaaatggtggcaaagcagactcaatgcactgtcgacatcattgcctgttttttttttttttttttgtgctggaagtctgtatcttgacaattttaataaatcagctggaactgatagaaactcgcatcgccaatagtctctatggaagtcaaactggaggtcctgttgtcgcagagcattcggtggtgaggctgttgtgtgcgcggatgaggggaggtggcaggagagaattctacatttagggggttaggctgaaaagtgttcaattagcaggctgatttctttttcctcttccgctagttgtgaaagacaggggaagggtgttctttctctctgccctccctttccatctccagctccccatttcctttctcacctcctcctccactccctgcctcttctccccacccatcctggcgggcgggctgcgcggaggctcgggagctggccggggaggggcggatggaggggcctgggttgccagctcccttggtcggggtcctgctcgctggggcttgtgtgttctctgcggcgggccgcgtccccgctgagcctcgcggtgacagccgcctttggcagcgagcgctcggggcacttctatccccgcctctcaaagggtggggacagccgtttccagatttgaattttttctgttctttatttttaacgctgcatcttcgcgtgtgctcagaggtggttgttggcggagaacgccgccgcagtgtttgacctctagcggtgaagggggaaggggaagaggaaaggagagaagtggtcggtgtctgtttccttctgtcccccggggccgtggagctgtcggagggaaggaggacggtgcggggccgcagggggcgcggggcgcggcgggacccaggctacgagcgggagggaggcgggagtcaggggaagacgcggcaggccggccgagggcaccccgaggaacatggcatggcctctgtgcgatccgagtcgcggtctccggggtgcctgggagggccgaannnnnnnnnnnnnnnnnnnnnnnnnnnnnnnnnnnnnnnnnnnnnnnnnnnnnnnnnnnnnnnnnnnnnnnnnnnnnnnnnnnnnnnnnnnnnnnnnnnnnnnnnnnnnnnnnnnnnnnnnnnnnnnnnnnnnnnnnnnnnnnnnnnnnnnnnnnnnnnnnnnnnnnnnnnnnnnnnnnnnnnnnnnnnnnnnnnnnnnnnnnnnnnnnnnnnnnnnnnnnnnnnnnnnnnnnnnnnnnnnnnnnnnnnnnnnnnnnnnnnnnnnnnnnnnnnnnnnnnnnnnnnnnnnnnnnnnnnnnnnnnnnnnnnnnnnnnnnnnnnnnnnnnnnnnnnnnnnnnnnnnnnnnnnnnnnnnnnnnnnnnnnnnnnnnnnnnnnnnnnnnnnnnnnnnnnnnnnnnnnnnnnnnnnnnnnnnnnnnnnnnnnnnnnnnnnnnnnnnnnnnnnnnnnnnnnnnnnnnnnnnnnnnnnnnnnnnnnnnnnnnnnnnnnnnnnnnnnnnnnnnnnnnnnnnnnnnnnnnnnnnnnnnnnnnnnnnnnnnnnnnnnnnnnnnnnnnnnnnnnnnnnnnnnnnnnnnnnnnnnnnnnnnnnnnnnnnnnnnnnnnnnnnnnnnnnnnnnnnnnnnnnnnnnnnnnnnnnnnnacgccctccccgcgcgccggctcaggggctgccccggaatcagctccccggggccgccgcaacgaaggtggatccgcatcttgattgttctccgggagcctcctgggggctccggcggcggcgcgggcgcgacccatcccgctggcgctccccgctcgctgaaccccgtttgcctgtccacaccccctcgctccccaccatttttcctgaccggcctgtgtccccgagccctcgcggcaggcccgagcaggcgatcgcggccgggcacgcgcgccccgggctcccgccccccttccgagcatccgccgcctcttttctgctgggtctgggaggagggaggctgggaggccgctcggggcccagcgtgccagccccggagttcagcctcccgagctgcggcgcccgcagcggaggaggttttcagtggctgattgaaactcactgcaaaatcaccacgactctttcacctactgagatgattgaccgaggtttggccttccatttttactgagatttggcgagaccgaatggaagcgtccgcacagtaactgcagctgctaggccagaggggccccggcgcccttcccgcctcccctcccgcttgcttttgccttactcgatcttaccaccacccctcccccggccccccgactgagaactcgggcctctcacccgccccccagcctcccgctctgggcgagcctcctccccagcccccacccctgggatgcgaagccagcaagcttttgctgcagatggacaggtttcttttctgtggctttttcctttcgataaaccatcagatttcagtagtacatttgggaaaagaaggggctgatggcgttaaccaggttctcaatatagaactggatttctggagttgtttaccttaccccacaccccctcaacatgtagactaatgcagccattggtggtacatttattttagccacggataattgaaccagcggtttacaattgacacgtgctccgtgctggtgattttatgtggcagccctctgctgcagttccgaaacttgttggcaacgtaaacccattgataggctgatctatgtattttgaaagcctgaaaacttggcatgtcttttctgttttaatcatagatgaatcttggacattttctgtggtgaggtggaaactttaagtaaattagtaaagtaataatttggcttcagaatgggaagagatagtcaagattttttttttttaaagccatgtggcctaacttgatacaaaaataaaagtaattgtttggcaatctaaatttaaaacctgttagaactcaggacaggcgcttcaatgcgctttttaacaatatttaaggctgttttgatgagtgcgttgtgagaatcatcttaatgaattctttattgagtgtctaaaacatagtataatacacatggtattcttgccactggatagtcttcaataaaagtttaattgatttttttttgttggtctcttaagtaagtcttatttttaactaagcattgacagaatatcttaaaatggtaacctgggggtggcgggtgggtgctgtgtgcacggcagcctagccagtggggatcctgctgtttattataagtagttcacagactctgatggcattttggtaagctttccatctttaagaaattgaaccagcattctcttattaattctttaaactgtggaagtaatttccagttcttacactctgatacgcatcccttttatttaaaaaaaaaaaaaatgctaataaaaggcagtgtacttaaactgtgctttgcaaatattgtgtatgttatgaatgactacagacactgggcaaattatttgtagaatgattatcctttagctagagaaagaaatcattacaactcttttgggcagagatgtttctttttaatgttaatcaaggggaagtgatttaaatatgcataaatgtagcagtcagggtgatttagttgcttttttcatgaaagaaaaagactcaaaagacaagacttatttttctcttctgggacttgaaatcataatcatctgatattagtacagtacaagaaatttacatttgttttttacttcagaatttaagtgacttttgcccaaggaatttgagaaataaggcaaataagttgctctattttaaagtagtcattcaatataaatatattatatcaatcttaacttttttattctctgatatgattaataatatgtatattcttacttttcttctaatgggcatatgtatccttgtggacactttgagagaggttttcttggactctcccatttatagaatctttatactcttttactgtgtggttccctgcttttaacagatttctgaggcaaatatatttgtgcttttttcttatgtaggaagaccagcgaaaatagtttactgagttgtcaattttatcagtagataagaaactttctttattacagtttcagggaagattttttcaggatatttctcagttattctaagggccaaattttgtaaaatttccattaggaatgtcagtttcaaataccctttgtatagcctaagcctgtgaggataacaagaatgagccttacctatcctaacacagggatttacaagttcccaaagtaaccgtctccatgtaactcttgacatacttttctgagatttggcttatttttattattggttatttctcactgttcattctatttgatttattctacaacatccccttttatttaatgatctggaaaattctgctctttgataacaactcaggatttttttgttcagttttggtttttgccccttcctgtggagcctacattttcaaccacaataaagatgaaacaaaatttatgaaactgagctctcttccattttacttactgctggcttttttttttttttttttccttgattcctaccataccttcgtttttttcattgtacttttttaacactacctatatccattagctgcctaattagttttatctgttccatgtggatgcagtgagtttataagagaatttcacaaacaagtagttttttagtgaacttaaaataaacagaattttaaaggagacctatttttatactcaataaaagcacaaaagtgcagaaagtataaaacggcttacaaagggagacacaagctcataatgttccatgtataaaagtaataactttattgggtagagatattcttacaagatctagcacctctgccagtgcacagataggactgttttaaatgatttgggaacttttggttgcctgcagttgtgaacagagaacttctctacagagaaacaaaccactaaaagcaatatgaccgagttgagatgtggtttccaatgagcaattggtgaatttaagcaacctggatgtgcatatgtggaggctcccgtctcactgtttgatcaaacttcttttatgtagtcacgtagacttgattttttctgctgtgaaaatgaaaaaataaagcaatatgacaaaaagtttaaaaatgcataaaaaataggatttcctctaggctcctcgaagagatttttttaatatgatgcttgtcttactttcttagacacgttacatttccccttccaaaaaaaaaaaaaaggacaactggaagtaatttatcatataaagaattttgatcaaatagatattgacaaagggccctctgtcacatttttcttcatccagcttttgttcaaaaacagtatgcctcctcccttgaatcacatagggagaaacgttatactccattctcattaatttcccattttgtctacttttactcttgtacatatgttgtgggtttaagagtcttttgcatttgttctgtgacacctttttttgaattgactgttttaaaacggaggcctattttttccggtttgggactcctagtggttatggcatcccataatgcttcgtgacggccaccaggacagaaccacctgatgttttagagcagttttcagcatgacactgttaacaagtgtgtattttccaaggccacatgaaacttactttcttagccactccaggtttgggagcagaaaagctgaaaaacccttttgtgtagaagtctgagtggtttgtgggggggaccttttttagagtttgcatgccagcgcacggcctattgctgtgaaacagagagaaggtaaagctacctgaggcagtgcgctggaggatgaagtgtttgatagcactaggggggaaagaaaatgcatggcaaagtttcgtcttctcgtagactatctagcatgcagagtgtagtgtgttgaaacggtgtatgacattgctgtatcaaagttgtaaaattaagcattatttattgaaaactatgtatttttttgtaaaaacctgatcacatagagaatatcagtggcttgtgcttgtgcttcgatctaaccagcttcttgacccacccccccttggtatgcagtgttaatgctcagggttgaaaatagtacactccaatgtctcttttgcaagagtttttcacagaggattacatttgttcaaaagactctaataaaattgtgtgatcaatcttcacttgtggtttttatgtgacttttttctagttttgcatttgataactgctgtttaattctgaaaatgttgtctcaaaccagatgtcagggacaggcttgaagattcctgatgtctcagcacccagcacggctgtcagcctcggcaggaggaagaccacggaaagtgagttttctgggcaggttggagagctgctgacagtgagaatgagcatggtgattacatctcaatatattaaactggctgatagagggaataaaaccacagacaaagtgtagaggggtagattaacatgttttgtcagaaatgtctgaagtagaaaatgaaggaaaaatatcaggggcagttgctgctattgaattcaataccagcaaactccattcctcagtgtctttttttttttcctataaacaatttacagtgtaaatgtattttgacatagaaatcattctgtattgagattcttgatataaaatgcttttatgagagcctgtaagtgatccttggaattattatcagattttttaaaagatgtgtttacatggtgagtgtgtgttgcatattaaatttggttttgtagaaacgtttgtgttgtattgtaaaaaaatctcaaagtgcacaattaacacagccgctcttaggttcttggttatgtcaatttccactacagaccaaagaacaaacatcagacctatctatggcaactttttctaataattacatcatttattcaatgtcttggcctcatttcagaatatttttgaatgtctttcatcttggtaggattttatttttatttaccttttgaaggaaacaaaacatagaccctgtagaatttttatctagcaaagaagttccttgcaatgaacactaatagatcctcaatatgtgtcaaattccccattgggactccttgtactatttgctatacaatttgcctttcagtgatgtggtgtttttcttaaatagatttttttttctaaaatttaataaatttattgacacctttggttaaaatgtcactgatacaatttttaagaaaacgtaaaatgttgaaacattgatcttctcccagtaaatctaggagtgaaaggaagagttgaagggatctttccttcagtgatagcttatctatagatgtcctaaatatagtctacgctcacacaatgtcatgatccaaatacggatagtaatagccttgtcagagaatatgttggttctcctcaaaagtaaattctttcataaaatgaatagcttggtgaacttgaaaaaattgaatcctgattataacattggtcagagcacatactatttcattaaaaaggccattctttcggtgtgttgagaacatggagagtagaaagaggtcctagcagagcagctcatcatgccactttatactgagtcttttgatagcactgaattgcaaagctacacattttgtgacctaccatcagacaactgaatctaaccattaaaggcagtacatgagaaaaaagttaggagagataagattttttgaacctttaaagatttctttctgttaaataatcaccaaggtgcgtttagcctgtgtttaaataccataggtgccaatcatttctgccatccttattctgttctgaaggattttgcaaactcacatttccagctggactaaatgaccatgttccacccagtgccccttggctactaaccaaacagcagctcatggacaataggcttgctcagaacctgggactcactcactctgtcctaagatttgaactgcactaataaccagactcctcagtcccagatttgcagttaagaaacacacacacaggcctagttcttggtgagagtggagttaggaggccaagaggaactctgaagcctgaggtagccgtagccaccacaagctgaaatgaggaggttggaaatatgaggaaaacctagaaagcagagaaatcataagggagaaccacaggagccctgagaggaggaatctggggtatctgggagaggcgggctttggcagccctctgccccagctccatggggtttcctgcagcagatctgtggccaggctgctggcagactgggaggtatttggctattccttgttactaacaaaaacatatttttttgtttgagtggcaacaaagccagacaaaaaattacattccctttcctcccttgcagagagagatgaccatgtgaccaggaaaacccctctacaaggaagcatacatagtgggtatgcacctttctgcatttgtttcttccttccatttgggatgtaggtgagatggcttgagctgcaggtgtgatcttatgatcaggaaagaggaaaaagaaatttcagattccttgaccagccatgacaaacttgagccactgaatcactgccaactgctgcgttgtgtttgagtaagctacagttacttggatgtaaatgtagccaaaccaaaactctaaaaaacttctattttcctgagattatttgagtggatttgtgtttctcttcccccattgagtaaaactacaaagagtttaaatagctgaagagggaggaggatgttttaaacactgtattaatattaaaatattaatacatggggagactttagtgaaactcacaaaagttgatgaaaatattttttaaaaaagtaaagagaaaaagaaagaaatgtcaagaatttgtacaatcacaaataggacaccagatttccacttacattttatgtttattttatataaatatttcgattaagatttgtttgagaattgcttatacatttgcagagcttctcagcttggtgatgatacaagatcactctttgtcttcacatctcaagcatttcctgattccattgccagcatgtacctcttctaggtgaatagtttctcactaatctaatcctttcagat

SEQ ID NO: 285 - DNA, 1239 bp, Homo sapiens
gacgacgacgacgacgacgagctgcagctgcagatcaaacaggagccggacgaggaggacgaggaaccaccgcaccagcagctcctgcagccgccggggcagcagccgtcgcagctgctgagacgctacaacgtcgccaaagtgcccgccagccctacgctgagcagctcggcggagtcccccgagggagcgagcctctacgacgaggtgcgggccggcgcgacctcgggcgccgggggcggcagccgcctctactacagcttcaagaacatcaccaagcagcacccgccgccgctcgcgcagcccgcgctgtcgcccgcgtcctcgcgctcggtgtccacctcctcgtccagcagcagcggcagcagcagcggcagcagcggcgaggacgccgacgacctgatgttcgacctgagcttgaatttctctcaaagcgcgcacagcgccagcgagcagcagctggggggcggcgcggcggccgggaacctgtccctgtcgctggtggataaggatttggattcgttcagcgagggcagcctgggctcccacttcgagttccccgactactgcacgccggagctgagcgagatgatcgcgggggactggctggaggcgaacttctccgacctggtgttcacatattgaaaggcgcccgctgctcgctctttctctcggagggtgcagagctgggttccttgggaggaagttgtagtggtgatgatgatgatgataatgatgatgatgatggtggtgttgatggtggcggtggtagggtggaggggagagaagaagatgctgatgatattgataagatgtcgtgacgcaaagaaattggaaaacatgatgaaaattttggtggagttaaagtgaaatgagtagtttttaaacatttttcctgtcctttttttgtcccccctcccttcctttatcgtgtctcaaggtagttgcatacctagtctggagttgtgattattttcccaaaaaatgtgtttttgtaattactatttctttttcctgaaattcgtgattgcaacaaaggcagagggggcggggcgggggaggggaggtaggacccgctccggaaggcgctgtttgaagcttgtcggtctttgaagtctggaagacgtctgcagaggacccttttggcagcacaactgttactctagggagttggtggagatatttttttttcttaagagaacttaaagaactggtgatttttttttaacaaaaaaaggg

SEQ ID NO: 286 - protein, 212 aa, Homo sapiens
DDDDDDELQLQIKQEPDEEDEEPPHQQLLQPPGQQPSQLLRRYNVAKVPDTLSSSAESPEGASLYDEVRAGATSGAGGGSRLYYSFKNITKQHPPPLAQPALSPASSRSVSTSSSSSSGSSSGSSGEDADDLMFDLSLNFSQSAHSASEQQLGGGAAAGNLSLSLVDKDLDSFSEGSLGSHFEFPDYCTPELSEMIAGDWLEANFSDLVFTY

SEQ ID NO: 287 - DNA, 80275 bp, Mus musculus
  misc_feature (1)...(80275): n = A,T,C or G
ccagggtgacggacattaaacagtcctcagtcctcagaaaatgcccagcgcgtatcacagtagagaaaaatgaaacagggaaaatcagatacagaaaagaaccaacgagaactctacagtaggagccctgcactgaaggcacacatcccagaggacaggaagagcagagtcaacagctgcctccaagctagggaagacggaaggggaaggagtcacatggcacagctggaaagatctccttcttatggtaactcagaaaccagaaacacacatctttttcaaagaaactctattttgtatgtatgagtgtttttgcctgaatgtgtttctgtgtttctagtacccaaagcagccagaaaagggtatcagattccctggactcagagctacccatggttgtgagctaccacatgggtgctgtgacccaaacccaggttctctggaagagcagccagtgatctaaaactctgagccatctctccatatcccttacccactcactttagaaaatttttcaattgtattttgtcagcccctatttatacattataggtatgtgtatatgtatgtgtctgagtttgtgcatgtgagcacaaagaatgagtactagcccactagggtggctggagggggaggtcatgagtcaccactccaaataaaaattttgttactgtccaacctaacatttgtacattttcatattgtgaccatttctgacttttcctgagcaccactgtagttactattatttatatacaaagctttctctaggttttggatacagaaatggcaggttaagtaacagaaatgttcacttacacaagctctatctagaaatgactgtgccatttttaaactcctcagcagcatgcaagagtgacaacttcaccatgcctacccagcaccactatttgtcagcagctgctaatgttatctcctgtgtgaaaataacaactgggcagaggcctaccatgactaacatggccttacaaaccttttcccagtgtcaagaataatgtaattttcatgatagttgtggtctctctgtgaagtctatagagcaggcatgtttatttccatttttataataaggaaagtgaagtccagcaaagttcatccatttgttaaaggtcatacagttagtattaagccacaaactgactccagagcccctaagcatccactgcagtgtccacagaaacaaatagctttcttattgcgatgcgatcatgacctgttcttaattacacaaagtaataggagcagtgagaaatggcccaatgatcatgtccccagactgcttcttaatcacttatacagtaaaacctatgtcaccacagaaacaaagcaaactacaaaagcaactaaacagggctaaggaagatggcacagtctttaaactgcttgctgcatgatcatgaagacctgagtttgggttgcccatacccacatgaaagctagggatgatggcacaaacctatgatcctagcactagagaggtggagacagacagatctctggagctcatgaatctggccaagtcactgagctctaggtttaatgagctcagcggacaaggcactgcctggcatggcggtgcacctctaacctcagcactcaggaggcagaggcaggcagatctcttggagtttgaggccactttgatggacataattccaaaccagtcagactacagagtaagataccttactctgttacttatatacacacaaatacacacacacacacacacatacacacacacacacacaaacatacacgaagagagagagagagagaaatactgacagagggacagagaaaggaagaaaaaacaattgaagaaaaaatccaagtcaacttgtgacatacacatgcacctatgtacacacacacacacacacacacatacatataccatgcacacgcataaagaagaaacagtaaacagaatatttaaattattgtaatcaatcattatacatagttgggtaatagttacgacttagaaatatatatttaaatctaataaaattttgtttgtgtggcattaaatttttttaaatgttgcctgaaaaaaatcaagagcaagatggatatgaaactaagaataagcttcgtaattaacatgtatacatttgtcaaaaatagttacctgattatcatatttaagagactgcgtcccaaccaagaagcgaatggcatctgtttccgcagtttgaggtgttagagcacgtgcctgaggagggaggaaatgcatacacatttatgaagttaggcttaataaacacagaaaagtcggcttatctcatctgctgagatgaaggataaatcagcagtgtctagaggcgactgcacactcctaacacaattgcacttcaaatctgtacgtgaaataactctaagtgggcactaatctaagcaataaagacacaaattatttacacagagatagttaagttgtgcaataaaaccaccatgtcagcaataaatagattggttcaacaaattatacttcatcaaaacaacacaaacagaaagggcttccggcgatgcaatgcaggtagtttaagccaatttccctgcagagaactggaaaagcaatgcaaaacacagtctgcctcaaggcctcagagtgtgacaagcccaggatcgcagggcagtggtggcacacgcctttaatcccagcacttgggaggcagaggcaggtggatttttgaggccagcctggtctacagagtgagttccaggacagccagggttacacacagaaaccctgtctcaaaaaaaaaaaaaaaaaaaaaaaaaaaaaaaaagaccaggatctggctactttgtccctggaggtttaagtctgaggaaaactgtgacagggtaggaggcttaaaatgcaaacatgcacagagcggggcccaccaccaaaacactggagcagatctcacccgtggggtcacagtagtgaggagcagaattgtaacgagaagtctggtgcaccctgaaactgcatgctcgcaatccttgatccgacaaacagcccactgctcccaggctgaggaaaactgccagcagtaagtccgccacaggaagggaacatctaagctctcatgccaaaacctagccctcaatcaaatgtaagtcatctcacaggaagacaaaaccacagaggcagaagaaggaaagaaaatggaaaagggcagaaagtctgatggcccagtctctaggaaacaggttctaaccttacagtgtgtgtacctggaaaagtagaactcgggcatttgctacagaggcctgtcatccaagtggatagccttcataccatgcaccccagttgagcaactagggctacaagttgtctctggagaatggaatggcctggggcaaagtgcctctgcaggtgaagccacctccagctataggacccaactgagagctacctgccaccatcacgctcagaagctagcagcctcctgaaggtgaagtctaggaaactaaggccagcataaagtgcagcaactgtgcttagagctttcataataaaagacaagatcttaagttccacactttgagaaaacaaagactgcccaactctgactgtgcttcaagcttgtaaagtagctcagctctttcagtgcgatcattaccaggacccaggccaaggccctggaacttacaccttacttcctgctgtagggaaaatatggcccatcaaaaatgtctacatccgtgttcagacacacagtgaagggcttgtgcagcatccactcagtcaagggctggaggaggggagaatgtccaggatgttattcacccttgtgctacagtcacaaacacatggaaatacagcagagtcagggtgagctacaggggggacctcaatcaaccctccagtttcatttgctactacctgcatgtgccactgaatgcccatgatcccaggcacagaggccatgaggtcaaggccatcctgggctacataatgagaccctccctcagatattgagaaaaaagggaccagacaatctggaggtcacacagctaaaccacatattattagtttgccagaaataacagctctactatgtagagttacaagtttcccagccgacttttacagagaagttattcttcacttaaatgacagctttgcatgggtgactagagcagcaagaggtttggtgccggtctccttggcagccttgcctttaggccagatcctattatgctctgcacagaaacattggtcactgattaagtattttgtccagaactgaattacgaggcttagttgacctagacttaagtctttctcctcctacttcaaagttaaaagattcttaagcagccatgactgtgactggacactccagaccatgaaaggagggaagagaggggacaccctgtgttcctggaagatctcctcattctcagaaaagacatggatattcctccatttcttagcttctctcctcatcattccctctatggtcctcttggatgagagatgttgatttgtgagcaaagctccctccctcttttccttttatgttcttgatccttaacacatctctcagacacggggtttttagtaagatgagcctccagtaacactaatggtagcttagaaagacaggtaattgcaaggactcgggcagctgtggctggctctaaagatggaagaagtagccatgtgcccaggaatgtgggtaccactggatgctggaaaaggcacagctacaaatgctcacatggaaccaccccaaagtgacaaagaccccagtgaattggctttagtgtggggcttctcacctacggaaaggtagaagcctctaaacttctgcaatttgtcacagcagcaacagcaagcccctccctcaccaagctcaccactgtccacagcaacctgcatcctgaattcctgactgtcacagctgagctccttatatttttttacaatttatttagttattatatatatgttataatatatatttatttacttatttagtttttccttcttttttttccttgaaaatcagtaagagaaagagtttaaccattgtactgaccatttagtttgtactctttatactatttccacaattggtacaaattttagattccagaagatcaaccacactgcctctgtgtcccctcccttctccagggacagcaacacaaaactcaactgatagtgtatttaaataaaatagaagaactacgtgtccagggtgacacacactctaacatctggaaaaggtgatcgtccactcaacaggcagagcaggctaaggacgcatgtccactcctgcctccccttccgcacacttggatggacatttggacagccttaaaccagtttgtgaaatggttaatcctttgtggatctagaaatccgcacagacacatgccaaaattggggcctattagtaacacctcagaacctttgatctttatgtgccttttaaagacctagcttaggccacactgactgctgaaaggaagaaggtggtcagcaaggctagaactcaggtttaccctgctgggaagaaagcagggaatgggctccacctaagattagtacacaaagaccttcaaatgcaacttgaggtcacacaaatgatacaaggattagagtacccaaaaatagggccaggaagaggacccaactgagagcgaatgactattttacattaaaagtcttttctgcatttcaagttgatgacgacaggcggagcaggctaaggatgcatgtccactcctgcctccccttccgcacacttggatggacatttagacagccttaaaccagtttgtgaaatggttaatcctttgtggatctagaaatccgtcaagtattctttatccctgagccatctcttcaggtcttctttcttttgagataacttttggtagcatatttgagacaactttcggccagccgggtctacagaagtgagttccagaacagccaggactacacagagaaaccctgtcttgggctggagagatggctcagtggttaagagcactgannnnnnnnnnnnnnnnnnnnagttcaaatcccagcaaccacatggtggctcacaaccatctgtaatgagatctgtcaccctcttctctgatctgtctgaaaacagctacagtgtacttaagaaaccctgtcttgggttggggaaagacggtgagaggacaacaagctagctaagacatttgtcaactgaataatgaatagacccactaggaaaatatgctaccaaaagttatctcaaaagaaagaaggcctgaagagatggctcaggggtgaagaatacttgttgcacttacagagaacctaggttcaattcctagtacccaaatggtagctcacaaccatctgtggctccagtgccaaaggatctgaggagttcttctggcttctgtgagcacatgcactgcacagacagaaaagcaagcgaaaccctgatacacagaaaataaaaataaataaatctaaaaaaaagaaagaaaagaagtaagaagcctgaacagctaccaccaggaactacactgtgaccagggtggcgtgagagtagaaggccgggtaagcagcaccatgctgctctgactgctgcacagccccagtgggagctccccagtgtgatgacgctgtcctatgaagacaatcacatgctgacacgaacaagaggcttctggagacctgtcaggaaggaagctgaatctagcattggaattctgtcccggtattcaggcattacccaaaatctggggaactgtgcctgtgagtaaccataaagatgaaagtaaataacgtaataataataaataaatagcagctaagagtaacttgatgctcacggagaggctccagcacccacatcagttggctcacaaccacctgtaactccaattccaaggaatccagagccctcttctgaccttcctgggcaccaggcacacatgtggagcacatgcatgcacccagagaaaacactcacatgcacacaatgaaaataaatcttctgaaaagcacacaggcttccttcctcaggaagcagcaggctgactccggcgcaggccctgtagtgttccccgagtcctcccacacaggccctgtagtgttccctgagtcctcccagtgcttctgaagttcccactgaactggtagtacacagagcaatctgaagacagttcattaaatgtgtgtgtgtgtgtgtgtgtgtgtgtgtatgtgtgcgcgctgtcttagttaagtcaggcttgcctgtccactttaaggtttccactgactactggggctatgcatctcacttaaaaattatcacagtccatagacaggcccctctgagataaattggaacatcttccagtaacttccatttgtacttaggcttccaaaggaacgctaaaaattgactctgaacatattccacacatttcttctcattttgcaagtaaatacactgataccccagatgagtgaaacaccctcaacaagctcagtagcagtatctaggcatagcctcactctgtcctgcattgtctgaccttagccctaccatatgatacctctatgcatccatagcctcattctttatctgtatagtgggtattcagaatcacctgcagaaagctgagtttctcctcccatcagaagtgaaggacaaccccacaaagcaatcattacaaatttgtgttcaagagcacacaatgtccaaggattttatttttatggaaggatcacaaaagaaaggagtgaggacaatgaggctacactggatttgatcccatctagatgatgtcagatgtaattcccaggacaacaaagaatagacaagaatattcttgtaggaatagaggagtatagaatagtcgtcctgattcctagcatgggagttctgcgtacccaggaaggcgctgagaatggcagaagtctccagtgagctcttagcaaatcatggtccaggtctgaagaactccctgggagatggaaaccctcatcccactattgactcgaatctgtaacgagtttagtagctattgaaataaaaagttcataaggaaaaaggcaagtatatttccaacctgagtgagcaaaatgcttcataacagaccagccagccagcactcccctccccacgaagtccctctttaatgctcttgtactgagcagtatccaacacacaactcaatggtcaataattgctactcaagaccccagaagtgcgagtgtaatcaagtcacctgcgaggccgagtgctcaccctctgctgtctatgccagccctgggcctcacttggccacactccccacgcgtaccctctccccaaatccgggccttgaagcccagaatccttggaaccagactgagtgtgggcgctctctggtgagggccaggcacaggcggcacctcaccgactccgccatgctcacctggaattccagcccgtaaatcaccggggcgtcgtcttccatgatactctgcctacccagctactcacgcctcagagctcgagtcccccctcaccagggatcgctcagaacccattcattccccgcctaaaaaaatggactacgagccccagaccggctccctgaccgctcacttcctgttttcttcgtcgcgtcatcaatacgctcctccccagtggccaatggcagctgggcctttattctgcgcatgctcatttggcctttcatgagacccagcagctgcaggagatcctgggttggagggcggggcccggagcaaaggctgcgggaaaggacagccatcagggcggcgctcttattctgcgctgctccctcaagttccaaagatctgagccctaaagagaacggttaacttggcattatggttggcagagctttactcctaaaccgtggtcctgagcaacagagcactgcccaacccactgccaggaccttcgatccagcctcagaagcaggctcttagatgtccatttaaagataagatgctgcaagcttgagtcaagactgtggtgatggtgtaagtgagcagtgacatacagcgagcggtgtgcacttcacgtaaccacccagtcctgcacagagacacaactaagcccacgatctaaactgtccagagctctcagagacagaaggctctaggacctggcatggaaaatactgcaagaatgcaccataggaaatgaactgtcttggttctatgaagttctggatctccacacgcgtttcttctgtgttttgactttgccattatctcttgactgaccttcatgacagcagtttctgtgatgctaccattagcccccttagtagtcatccattgcccacctttgtcttaccttgactttctgataaaacctctggcaactagcttccaccgaccccaaagctatgaaagtcatgagatagcacctgagacctacccacctacccactgcttccgaagtgtgcttaagaagtaggtatttttggttgttactgtaaaacttcatcaaattgttatcatgtagggcagaatctacggtgacctgaatctatgttcccaagctatagtcactcacagaataaattcttcttccctttgagatgagagctgtgtttttacgttgtcatagaaatgtgacacagaaaatcaagaaagcaaggttcttgacttgaggacaattctcaaccaaccatgagttcagcaagcaaggctgactcttgactccttaattcctccccgcaactttacggatgttagcacacactgccacagacacaaggtgggaaacgtggagaatcaactagcacaaagacaaaatcctaggaaaaaacatccttggttggtgacaggcccaaggacagacgattttcttcaatctccaggaccatccttgtcccctacccagtttggccttaggccccgcccacagctcttgagccggaaatgcgcccggcttctagtggagagcttagcggctcccaaactgagcatgtgcggaagtcgagtctccgtggccagcacgcgcagacgcacaagcgcgggggaccttggatcttgagtttacttccggtcttccgtcatctcttcggacccttttcgcctgtgggtgacccgacctcaggggcgggtggcaggtgaggagcgggtcgcagtgaggagggtcgccggtaccctcgaccttcccacagagggcggcgtcctcgcgtaatcaaccgctctcggccacgcagagagtagccccacgaggggctggctccttcgggctttagccaattctgtgtgctccctgtggttttggacaaggtacacaccctcctgacctcggttttatgtgtataaagtgcgggttcgttagcatgcttagaaggtgcccgtgttacatcaccagtgttcgagctatgtttttggtttgccccaacttttgctcctgtcgacctcggtgtgtcatagccccacaataaatgaagcactgcagtaagccagagtcggggttaagagatagaggatggggtgccatagacataacctgaccactgacgaatgagtagtgttgtgtgggaaaagtgattccttcctgtaagcattcgggagattgtgatgtggaatattttaagtttgaggtcagtctgggctaaatagggagacaccccaaccccctcaaaagaaagaaagaatgaatagagtctaaaaactaaaacaagggttgacaggatggctcagtgtctgtcaccattcctgataatctgagctgcatccacaggacccacacgatggaagaagagttgttcttccacatgattgtcttctgaccataaatagacaaatgaataaatacagtaagacgaggtgttggtgctgagcctgtatctctcagcatttgagaagtagaggcaggatgttcaggagttcaaagtcgtcttaggctatataacaaatttaaggccagcttaggttacctacgaccttgatttataaaaacaaactctcacacatattaaaaagctaaataaatgttaaaaaaaaaaaagtatcagccagccagtgtgtggtgaaatcggagtgtgtgtatgctgttgcaggaaggaactgcaggtctgtgattgctcttggcagtggtggtccttttctctgagcgctcaggaggcacaggcagactgatctctgagttcgagggtagcctgatctacagagtgagttccaggacagccagggctacttggagaaactctctctttaaaaacaaataagtggtcgggcagtgttggtgcatgcctttaatcccagcaattgggagtcaaaggcaagcagttttctgagttcaaggccagcctgatctacagagagagttccaggacaggctatacagagaaaccctgtctgggggggggggggggaagagagagagagagagagatcaaagtggtccttgatacatagcaacagttaagtttactgtggctttgggtacataagacccagtctcaaaagaaaaatttgatggccatgatctagcacattgatttctgggcattgaaataggaatttgctgtaccaaagaattgaaattagagtctcaaagacgcacacacacagacacacatcctgttcacagaagcactgtgcacgattgctcgaggctagaaggaacccaagcatccatttgacaggtaaatggatgcgctaactggcgcacgcctgcagtgctgtgttgttactcacctgtccaagggaaggaaagcccattggtgctgcggcatgggtgtcctgccgtgaggaatggactgtggtggctgtgcgttccagttcagaggacttggcgctcaggaagcaaagagggcaaatagcacagagcaggctggggcagccggtagacagcaacacctcatgcagtcagggcttacaatagccaacagagaagactaccgtagcctgacagaaagaggggccaaaaggcatcatcaagtcagtgctcccagcatgccccagagtctgctggggaagcggcttcatactggattcctgagtggagggtctgggcagagcagagcagtgtccacggatgagcttcacactggtgccaatggttaccttctagctgttcacaagcgcttcttttcacgctcaagatgtgttgctattgttagcacccagacaaggcccttggacggaggacactatgagatagacatggttgagcctgatgtgggggcagggacgatcccaccttcacggtaagggcagacagcacttgtttactgatacactgtatattgcaatgggccaaggatgtcatgatgaatgccttatgattctactcacttgaggtccccaggaaatataaaagatgggaaataggatggtggtcatctgttttattaaatgggtatagaactcctgtttttgcaagatgacaaaaattctggaggttaattggacaataatgagaatgtactaaacattactgaactgtatactttaaaaaatggtagctaagctgggcagtggtgatgcatgcttttaatcctagcacttgggaggcagaggcaggcagatttctgagttcgaggccagcctggcctacagagtgagttccaggacagccagagctacacagagaaaccctgtctcaaaaaaccaaaaaaaaagaaaaaaagaaaaagggctagcaagttttatgtgtattttatcctaattaaaattaagtaaactagaaaaagaaaaacttttaatttgtgccccttggatgtggaactattaaacatgtgttccactgagcgataagataaaagtagtacagcctatgtctcagaaccgcagaggttgtgagttcaagtccacgcacgttatgtgaaatcctctctcagaaaagaaaacaagtttatttacccatacttgaaataaaacagtggagtgattcacgactgcctctatttttagacaacatggaaacagctaaagatggtgagcagagcccaagtgaggcatctccttcagcccaggcaggtcctgaaaacatcccggagcctatgtctcgggaggaggagagccagccattgtaccatgaagagaccattgatcttggtggagatgagtttgcatctgaagagaacgagcccacatcggaagggtctcacaacttcggagataagcttaatgagcacatgatggaaagtgtgctcatctccgactctcctaacaacagcgagggggacgttggcgacctcggctgtctacaggatgttggggagccccccagaggtgccactgatcaccgactgcccagtagcacagacaaagaagtggtggacactctgagtaatggcagtgaaaccgatggagacgacactcccagagacatctcagacatgacacctgatagcagagcctctctgaaggaagactcaacacaggaagatgtgacgagcatgcctgcactggagaatgctgccacggaggaagtcgggcctaaggacagcctcgcgccccgagaagagcagacctcagaagtgtcctccaatcagtcctcctccaaagacgagcccttgcccgtctgcaccatcttcagccaggctaccgccactccctcccagccacacctgtttctacaggatggcttcgagtcccagatggtgaaatcacccagtttcagtagcaccagtgagatgtcagccaagacccctcctccgatggtccagcccagtcccagcctcagtacattttttggagatacaatgagctctaattccttggcctctgacttctttgattccttcacaacttctactttcatttcagtcagtaatcccaatgcaggttccccagttccagaaaagctgtcttcactcactgcccctgtaggagagaagtccccggattccaccagcccatcttactccacaaggatggatagatcggaatcaggtgtttctcgggcccctctggatgtccctgaatctccaaagccattttcacagatccaggctgtgtttgctggaagtgatgaccccttcgccacagccctgagcatgagcgagatggaccggaggaatgacgcatggcttcccagtcaggcgaccagagaagtcctgatgtcagtagcaacccagcagtatggcactgtgttcatagacaaggagaacctcactatgcctggcctcaagtttgacaacattcaggtaggatgaggactgtttttatgtccatatctcactgcgtgtaatctccttctagatctgtgtacaacagagaggcttgtagtaactctggctttcctagttactgggctcgacagcacctatacctgaagccgcctaagcagcacgtactgagtgtgcttcttaggcttgtgggtcttgcctacttcttacttcttgtagcagcaagctgactgagttcgaggccagcctggtctacagaatgggttccagaacagccatggcactccccgttgtgtgccccaccccacaaatgcattctagagctggaacgataactcagtagttaagagcaccggctactcttcggaggagctgggttcaattcccagaactctcgtggtggtttacaactctctgtatctccagttctgggggatttgacacccttttttggcctcctcaggcacacatggtgcacagacacacatgcaggcaaaacactcataaaggaaaataatatttcaaaaaaataaataataaaaggatgtattctagggctggagagagaacttggtgcttgctgctcttccagagtactacagtttggtttccagtactgacattaggcagctcacagctgcatataactccagctccaaaggagccagtacactcttgtggcttctgaaggctttgtactcaggtatacatagccccagatagacaaacacacacacacacacaccactaaaaataagtctttatgaaagagtgcatttcaatagtattagctgagagtcagcagattaggtcagacccagagcaggataatggatgactgaataaactgaagagtccagatgtggatctgtaactgcaatcaagcagttctaatcagtcgttagtcttgcagtgccttcagtgtagatgtggcttgcttctatgaagttctgtgtacaagatgccaatcagatgttctccctctgacactgttgtaggtagagtgtcctttgttctaaatcagctccataaatacttacatggaggtttgttttccaagtggcttatctaattaaaggtctcatttttatgagataattttttttcacttatttattcaacaactctggtggcaatcaaattaagttagacaagccttagagttatgattggaaagctgtattcagctctagttgcatcccgcaaggacatgcacatttctatccaagtgttttgttttgctggatggtgtcttagttatggttgctattgctgtgaaaaaaaaaaacaaaacaaaaaacaaataaataaataaataaatacaccaaaaacacaaacaaacaaaaacatgaccaaaagcaacggggggaggaaagggtttatttcagtcacggttccatatagcattcatcgtcaaaagcagtcagggcaggaactcaagcagggcccgaacctggaggcaggagctgatgcagaggccagggaggagtgcttctttctggcttgtccccatggcttgctgaggctgctttctaagaaagcccaggatcaccagcctaggaatggcaccgtccacaatgttctgggctctctactgtctatcactaattaaggaaatgccctgcaggtttctctgcagccccatcttatggaagctttttttttttttaaactcaggttccttctgctagactgtgtcaagttcacataaagctagcccacatagatagcattcattcctcttcatcttgggtagcaggcatacagtctcatagattttcactgtgacatttccatacacagatagcatgtcctttgctcgtattctccttctgtcacattcctttgtcctctctgtcactcgacagcttctttcctccagagtgtattctgcttgccatggcgtgtgcgtgcgtgcgtgcgtgcgtgtgtgtgtgtgtttaatctaagttcaatatatcaaaagaaaacctaagatatttgtctttctcttttcccttttattgtacactcttgcttcccaccttgggtccttccctcccgcaatgtgaacttgctgtgtaaatcaggctaacatcaaactcttaatcctcctaagtatgtggtcaatcctgagccagcacagccacctcacagtagttcttctttcgcagaatcttttaagaatttcctataatgtctgtacccgctgacgttgtcagggctctccctgtggttctgctctgtcttaatgttgagctgtgtgtatccaccataaagatgacaaatgtgtctcagatctatgtctgagctgaagagctagaagttgcctctaatcatctggaaaatggaaatcacagaaaatgtcacctcattcctgttaggatggctgttaacaaaaagacgggtgatagcagtaatcacagtgaatgtaaattagtaagccattatggaaagcagcatggaggtgctttgagatattaaaactggaattaaccacatgatccaactgaaaccaagtcagtatcttagaaaaagcggaacgctcatgatagagccacacagccagcctgagtatccatcttgggtgcagagataaagagaatgtggttgacttcctttgagggtaaagctggaagggcatagctcgattacatggtagttttgttcttgtgtttgcttttgaaacagttttgctacatttggtacatgcagctgatggctaatctgtcttggaaggatgtaatagtaaatgaataactcaagcaaagaaacacagacaccacatattctttcttatagaatcaggaaaaaaaaaacccacaaacaaacaacaataacaaaaaacctgaactcatatccgagagtacagtagaaatttgtgggaaccacatttgaggtatgctgggtgagtgggatctaatatgcagtatgatgacccagttagagtattctgtagttaacttagaatttatgagaacaagttttaaatcacacacacacacacacacacacacacacacacactgcagctatgggtagtggtggtatttgattaatttgtgttattcagtacaccctatataaatattgaatcagcatgttggactctctgaatacacagttttttgtgtcagttaaatatctttttgaggacagataaagccaggcatagttagtgcacgcctatatccctgtatttgcgaagtggaggcaagaggatcaggagttgagcattaacctaagtaccaaggtaaagtcacactaggcctgcgccttacatcaacttgacaggagctgttgtcatctgaaaggagggaaccccaattgagaggatgcctccatgagatcttgctgtagaacatttcttaatagtgattgagggtaccatccctgggctggtagtcctgggctgagcaagccaaggagagcaaaccagtaagcagccctctgccatggcttctgcatcagcctctgcctccaggtttctgccctgtttgagttcctgtcctgtcttccttcagtggtgaacagtgatatgggagagtaagccaaacaaaccctctcctccccaggttgcttttggtcatggtgtttcatcacagcgatagtaaccctaagacattgggctatatgagaccttgcttcaaaaaagccataacataacatatatacatacatacatacatacaatgttctattcttacccacattcctttttaaagtagagttaaagagctggagaagtgactctgtggttaaaagtgctttttgagcttgccaagggcccaagttttgttcctagcacccaggtcaggcagctcacaacctcttgtaactccagctccaggacgtgatgccctcctctggcttctgcaggcactgcacatgtggctttcacacacagagaggaggaggaataaaacaaagctagaaatcaaataagcaaacagattaattttatcatctggtaaaaaatgatctgggacacacaaaatttctttgaggatctcagaaactacctggtgctgatgcatgtgtattggacaaaccttgcattgaaggggctgcttcagggacttgcatacgtgacccagagatatccatggaacggtaaaactttagtgaaccaaaagttgaaatttccgttgagctgcactaacccagtggcaacctaagtgacagtggctggattggataggagtttgtatccatatagtggaaagtcagctgaaggtgaccagggctgtgtatccatctgtcaggactccccaccatcagggcgaggaaaggtagggcacatgagcatcccttcaacaggtgtatcactgaacaacgaagtgtgcgtacccttcccagtgtcccttgacacaggactcagccacttgaccacagcagcctgcagatcagggttagttaggcaaaagtaaggtattgtatccctagaaggtgaaaatagagacttatggataatgaagccacttctgccatgacttccctgacacaaaaaagtctcagcttttcacatcagtagcagctgttgttgctaaactactgcatgctatggctgcaccagtcaagtatgtccagcatgcaaatacatgtacccggggcagcacatgcagatgtccagcatagcataaagtacgttccagaactaccctgtgttgaattgttagaagctgaaggaagggttcagaccaaggaagctaatcatgcagccaatgttgtgtgtccgtgtgtatgtgtgtcatacacactcacattcctattagtaatttagcaaaataacaatggtacaggtgaggtgttttgagtgcagctaactctggcatgagggaagctgaagcagaggactgggagttcacggccagacactgtgctgagtcctgtgtgtggattatgccactgtttcccttagcttgtctatggaaatgtgggtgtaactcagtaataaagtagcggagcaggcttccaaaatggacatgtcagtttacattgtgtccagcactctgtgtttcttctagtaaatttggggacgtgttgttgttgctgctgttgttttacttgctattgccttggaaatggagtctgcattctttagtcactttcaatatcaaacaccttttgctatatatgctactttttaaatcttttttttccttatgtttatttacttatctgttgggaatagacacatatggaaatcagtagacagcttgcagaaggcaattctctgcatgtggctccagggaccaaatccagatcttcaggcttggcaccttcttcacccactgagccatcctgccagccctcagaaaacaatttatgaagttgtctgtttgaatgttttctttgtctttaagctttgaatgtctctcttcctattactgcctaactttaaaagctctttaaactcagttaatggaaatgagtaatatctatagcaaatattttccctattctgggccttgctagtacatagtcttttttttatatttttttaagatttatttatttattatgtataggtacactgtagctgtcttcagacacaccagatctcattacagatggttgtgagccaccatgtggttgctgggatttgaactcaggaccttcagaagagcagtcagtgctcttatccactgagccatctcgccagcccaatacatagtcttatggtgtctattgaagacaaaaccatcattttttttttatcacaggcctattagtccatctattctcctagctgttgtcagtttgagaacttattacaccttcctttcttaaggcacggggacaccttgtcttctgtagctcctgtgtgcttcctcccaggatgctttaatatttgaccactgtggggtggaaagatggcttggtttggtagttaagagcacttgatatttttctgaggactcagattcaattcccagcacctacatggcagttcacagccacccataactccagttccaagggatctgacaccgccctctgacctcttcaggtttcagccatacacatgcaggcagaaccctagaacatatcaaataaatacatctaaaaaggagaaaatttaaagatttattcagtcctgggactgggctagagacatagttgtgcaatcaagatcttgcttgctgcttttccagaggacccaagttcagatcccagcactctgacctttaagaactactcactccctcaggagaaggctgtggtatcctcaaggccttccctccatgaccgcatcctaggctagagcaggtctgtgattacagtgacaacccagcccagtgcagcagcacagctgcctctcctcgttctagtgagtgagtgagtgagtgagtaagtgtgtgagtgagtgagtgtgtgagtaagtgagtgagtgtatgagtgagtgtgtgaatgtgtgtgtgagtgagtgagtgagtgtgtgagtgagtgtgtgtgtgtgaagaaggtaaagtagaaccccgtcatctttcttgccatcttcaccttcagtttagaaacacagcagacacaagatgtgtcataggatgtgggtgattgctttgggctgtcttaaatgagacattgattagtcaaccatacctctctacccaaagagtgtgctgtcataactaatccttgttaaatgtttacattatttattagtttgtgcagtgtgtgtgtatgtgtgtgtgtacatgtgcacgtgtgtgactgagtgtgtgtgtgtgtgtgtgtgtgtgtgtgtccacgtgttctgcagtgcatacgtggaggacagagatagcttgagagatggagttggttttcccctccacctttgcctggattcccaggactgagttccggttcccaggcttgtgtggtgcgagggaagcactgtcacctgctgagccatctttacagaagctgaactttaaggaaaagaactttaaggataaaatatatttatggtgtgatctcattagtagagactgtcacttggatgcaggagattcagatttgcgtttgctttttgctcagctctctgcctccacaactctagaaattctctgcatttggcacaagcaggacttttgtagttcatgggatcccacattttcacccatttttatttgctttgtaaacattgcttctagagcactcagctgctcccgtggctgtgataattggagtattttaaccttattctccaaaagcagaaattacaaatttgctgctactaaatatttgcccccgtatagtagcatacttggcctctttaagcaccaggctcaaccaccacagagcctgaaacagcacagagcccagatggcctcctgctgaggtaggcagcctacctctctaggtggctaaagaacagacagtgtccacaggactagaggcaccatctccagcaagcaggtttgggatctcccgcagcctgtgcagcacagtgctctctctgcactgtcacaacttcttggtgtgagcagagtgaatgcttgtcgtcatttgtcactgacttggtttatcaaccacctcattcatgtagccttagagaatcaggagcttgtgacctcatcatttgtcatgccctatgcttcatgtccattatattgctcccatcactccaggcccttaggacctttctccccacggctcacatgggcctttcctcctcccctgctcgcctgtgacttcccttttaaaggaagtataatggctgaagtaacacttaatgtcttccatcttgcttctagatgggcatagcaaaaagaataaagttaggaggcaaaaagtggcccagagcagagacagttttaaagtacatcctccaactccagcaggcccagaaccctgggtacaagacagtgacaagagtcctgatcatattgggcttggctagtgaaggagccaccagcatgctggtggaggtaatgtcacacacacggcatcccaggaagcttgaggagctggagcgacacaagcctgtttggtctcccacatggatgggggctctctcctgtgctgaaagtctctgtccttgacaggctgtaggctctacagaaaacctgatgtggtggtgatatactgctttcttctcaaaataaagattagttgtaaaactaggaatcttctagaagttatggcttagcttctgactgattgcagttttcttgtgcaaagctgtaaacatttcattatctctgcctctctctcccacattctttccagggagatgcagttaaagacttgatgcttcgcttcctgggtgagaaggctgcagcaaagagacaggtcttaaatgccagctcagtggagcagtcctttgtggggctgaagcagctcattgtaagtaaccacacactgatttcagcatgtctttgataagcccggcttccttctaggtccttccctggaagttaattgctctgaatacagcgcaagaagctgctgcagagcaagccttgttctgtttgatgccagtcctgggaagcaggagcactgcgccagctgctgaccatccgaagttcagttggttactgtgaacaatcagagggctgcaggcagccaggtagcagactcccatttctagaacaaatacagacagtttgtgtgtttgtttgttcatttgtattttttgagatagtctcaccgtgtcacctagactggcctcattttcacaggctcaagggaccctcctcaccctcttcttgccttgatggtcatttcaaatgtcctccatttagtctaggcttactgtttaactggagaattcctgaacactttcaaatttcaaacgggtctctctaatctgctagttctgcatcatcagcactacactggctgacgttgttccagtgatttttagggttgtgggagaacttcagcagtgtaaccagtttcctctggattattagggaaagccctagaagttgatcatacatgtctcctgtaggaatcctcgggcagaattccttctgataaaggaatgctcgcaattggtagccttacaccccatggtgtccacgtctgagcacggtcagtgggcatgccttgtggaagggatctgggaagccatgttgggctaaagcaaagggaggtccaaccgttccctgactgctcagtcactctcctgactgtgatgagcagacagggattcactgggttttctgcttataccactcatttttttcaggagttgagtcttgggtttgggtttattttgcttgtttttgtttttcccctgtcataactagttttttgtttcaagcaagttttaggacctaaaggtatactatttgagtaggtctgaaagatataccatttgaggcttacactttttattaaggattaactgcagatcatctaaataaggtaaaggaagcaggtgagaaggcgcagagggtaaaggccagggacctgagtttaatccccaagtctgacaaggaggaaagagagaaaattatcctctgacttgcacgtgcatccacgcacacacataaacacacaaaatacctaaagaaaatgaaatataaaaagtttttatgtcaggtgaaggttagcatatgaactaaaaacaaaaaagctttctgagtttatgttggagacacccattgtggagtgtcagctggccaggctggggttacacctttcacatcaggtaagaaagccttagctgcttgagcagttgacggtgcagtgcagagtgagataagccccagtctcagactggcatcaggtccacattcaacgcagatgtgaaaggcaagtaaacctcacatgtccttacctggcagaggtgacaagagtttgagaggtgccctgagtcacaactcagggatagtagatgtctaatcttaacagagccgtgtgtggattttctccttcattgacaggttgtcttgaatccagatgcccaagccacatgaaggatcttttttcattttaaaaaaaaatgtattatttataaaatgtaagtttgcatgtatgtatgggtgttttgcctgcatgcatgtctgtgtatcatgtgtgttcacagtccctccacagagtagagaccacatcctgtaacctgggactgaagtagttgttagctaccatgtgagtgctgggattcaaacccaggtgttctagaagagcaaccattgctcttaacttccgaaccatctctccagcccctacataataatatttttgacatctgtcttccatggtttagaaggagtcaggctgtctctgtaactgagccacaactagcaatgtaaaccttgttccagagcatagacaataaggcctttcagacagctatgccaagacatcctctgtggtggcatcagccaggacttccactcttggtgcctgattcccaccccgctgcctctgcagcagtttatatcccggtgtcttcttagctgcacatatgacacctgtgccctacaatgcccaaaggaaaaataactaaaatttgctcctgtcacccaaaggtttgcttcctagcctttggtgtattttttatcttccttttatctctgctcgtttgcccagaaaacctttttgatcttactcatgcacacaccccaaaaaaaaaaaaaaaaaaaaaaaaagccagtgttttgacaatacactgagcctttctgagccctctgtccccagacaatagtgacttcagtgtcagtgggcaagtctgtcttcaggtgcagcaaaaccatgaaaaccagtaagcaccctgacagtcaggaaacggctatttcattgacagaatctgcacacagatggtgtatagagaactatagagaattggctctgggaaggaagctgaaacagtagagtcagaatactggttcgaaaaaaatggaagaaggactaataagatgaatcagtgggtaaagactcattgctacatttgataatgtgaatttgattccccatatggtggaagaagagaaccagtttctttttttttttttttttttttttttccagttttttgagacaaggtttctctgtgtagccctggctgtcctggaactcactttgtagaccaggctggcctcgaactcagaaatccgcctgcctctgcctcccaagtgctgggattaaaggtgtgtgccaccatgcccggtgagaaccaatttctatgttggcttcaacatccagatatgtacatgacattcacacccacccacatacatatatacatacatatatgcataataaataaataaataaatagtatgttttggaaagagaaatgaagaataagccaggcaaagtggtcacatgcctccagtatataggacatcactagtttgagatgagggtggcctgtgtagcagacagagagagagagactgaaactgaaactgactgactgactactgactttagttactcttctattgctatgataaaactcctttatagaaggagactatgtgtggggcttgctgatcctgaggggtaagacttgataatggtagaatggggtagtcagtggcagacagctggagcaaggactttgagaaggaagcagagcacactgagaatgccatgggtgtttgaaacatcaaagtcctgctcagtaacactcctgtttaagtaaggccacacctcctaatccttcccaaacagttccacaaaccaaggcccaaacattcaaatgtatgagcctatgagcctattctcatgcagaccaccacagattggtgtgaagctcacatagaaggacagatgatgcgtatgcccctgctgcctccagaccctgagcatgaccagaggggcctcaagaggatatggccatggaaggcagcaggccagcctagggcagagcacttccaccatgaccattctctgtgtggaaggctcacttttgtatcttttgtgctaataaaaagaggggaagtgtatgagcttttcattaaaaacaaaacaacaacaaaaaaaaaaaaactagaaaactgaggccaggcagatgttgtggtgcacattcacagtgccagcactgaagaggtggaggcaagaagatcagagttcaagatcatcctgagctacacagtgagttcaaggccaacctaggcaacaggagaccctgtctcaaaagctgttttaggacttgggagggttatttttgtttttaaaaactgactgcttcctaatcagcaaaataagggaggtgccgcagaccctctggatccctttgtctgcgtggaacgggtctctggggcaggtgggcaaagcgtcggatggaatgacagacagatgcacacaggagaggttgtgtagaatctgaatgtaatttgtcaagtcgagcatcaaactttttatactttatacagaagaaaatagggaagttgggtgacacacccacaaggtacaaagaggttactggattcttacataaaacagaggaatgcaaacacagaaggtctaacaggaaccacctgggatagaattcaacaactgggatcaacaagagctccacctaagattcacttaatcttagaagccagggtcaagggctttgtgcccttgccatagttcctattttagtctattgtatagtccacctttcccctaggccattgtaaatatgtgtgtatggatgcaacttagctatctatagttctaagtatctattctggttcctctttaggtctcaaacttccttcttaagacatagtcttttgttttgttttgtttttttttgttttgtttttcgagacagggtttctctgtataaccctggctgtcctggaactcactttgtagaccaggctggcctcgaactcagagatccacctgcctctgcctcccgagtgctgggattaaaggcgtgcgccaccacacccagcttcaaacttccttcttcctagatgatggtaaattcctgtgtagggcagtgacttagcttttattcaaagtgatagtgtaataccagaggcaattctgaatgtcactgaataggcaacattcttactgaattccaagcccatggtctgctcaaggactttctgttggaacactggcaaaggctttagctatgtcagaatttaattttaaaaggcacttataataagataatactaaaagagagcacgtggatccatacaccagactaactcgggaatggaatattaatgtatgggttagagagaatgccagcctccaggaggtgagtttccgtgaaacgctttgcctcgtgagtggcttttaggcctctctgcttgtcaagctgactcggagtgcatggcagggagggagacctctaacacaaaggacaaagtcaccctacttcccttttttcactttgatgaactgtaattcaaaaccatgacactaaataaacctttcccccaaagtagggaggagcatgtttgggggaacttttcccacccaaaagtccacactttgcagattagaagacaggaaccgggctggagagatggctcagtggttaagaacactgactcctcttccgaaggtcctgagttcaaatctcagcaaccacatggtggctcataaccaaccgttatgagatctaaagccctcttctggtgtgtctgaagacagctacagtgtacttacataaaaatcataaataaatctttaaaaagaagaaaaagaagaagacaagagcctaaggcaatgtcctaagtgtcccagtattgactaggtactgcacagcccctgaaaaccatgctttctgtggacatatgtcatttcctgccacaggacatagtatttctgaaccactgactatgtgcactggggtactttacagagtaatgactagaactgggctatatccagcagtgagatgtgtgtctgtctttctgtgtgtctatgtatctgtctttctttgtgtctgtatgcatatcaatttgtctgtgtatatatctgtttgtatgtctgtgtatgtatttgtgtgtccctgcatgtgtatctgtgtgtctgtgtctgatggacttgaaacaaattccatattaggttttccagtttatatgtgtttattcagcaaacacatatcaggcttttctggctggccctcactctctgaaggtctactttcacagtcacttgtaaagtggactctgatttagagatgtgatactgttttttaaaaacttcacatcctagactcactggcctgaggggctcttcatcagcatcttcagccctgagagacaacccagctttcctgaccctggtaatgaatattggcttgtttcttctctctcctcactgtgccttcacacatagctgcttgttcagagctggatagcagttccctgagtccagtcaccatgaggaatcccttgggtcttttgtgcccagggaagagtcccagctattccccttgaaaggactgagggatccttccagagtctgagaggccaaaccgtccatccctccccctctctgcagttgttctagaacaattgtgtggtcaccagaaacaagcacacaggtcttcactccatgacctggaagagtactggacccagtggagaccttgtcccgtaacagaagcaggcagctgtcaccgaggcaggcatttatcagcccaaccctgagtcaccaacaccagtgtgcccccagacctactattcgactcggcgtctttcactacactactgatgtgttctcagaaaggtcagtgactcacgtgctgaggtgtgttatatacagaacaattaggtttaattttcagtaaatgtcaatctactgtcccattggttctcttactgaagtgactctgaggttactcctgtgattgaaagctttctgtagctctgtgtgtcagcagcttcctgtgatcccagcagtctcgggctgaggtgagaggattatgagtttgagaccagtctgcagtatgcagcaagatttttaagaaaataagactttgttggacaaaaaaagcaagatactggttttaaaaaaaagcaaggacagctgctttaagtgactgcttttctgtccttgctagtgagattgtaggtgaccatctctgcagcccccgtgagctggtcagcaagcaggcctttccatggtaaggggtggctgttccccttcttcaatttggactttaaaaagaaaaccaaaaaagcaagcctgacttgatgatggacaggcttcatttcccagttcatctctaaagtacacacgggccctgtactgattataatccatctgcctggtgtgtttctaccatctgtagttattccttatattaatacatgcttttatctttctcccatacactgaaaatgctcaaggccattggagatcccactgcaggaacctgaccaggcatcctcttcaggacgggtgtgtgtatagaaaggccatggtgttcattgcggcctaagattccctgccatcacatcctcagtgtcctaagtcacatcgccagtgctctaagcctgtaatgtacggagaagcaaatgtcactgcccggagagaaggccgttttactcactcgcatggtgttgtgtgcagagtgaatgctgttgagtcgtgtgggcgagctgtgcacctactctaatcactcagatacttcacgccgggccatttgtcctaacactggaagtcagagtgcctgggctccgttttcagagtcttgtcttatttcctacttcttaaaaagtaataccaatttaaatttagaaatttttctccttccaaactaaggtcgccagagcgctgcgtggcctatccagtagagatagactttctataagatataagagttcttggggggctggtgagatggctcagtgggtaagagcacccgactgctcttctgaaggtccagagttcaaatcccagcaaccacatggtggctcacaaccatccctaacaagatctgactccctcttctggnnnnnnnnnnnnnnnnnnnntcctaagtcacatcgccagtgctctaagcctgtaatgtatggagaagcaaagtcactgcccggagagaaggccattttactcactcgcatggtgttgtgtgcagagtgaatgctgttgagtcgtgtgggcgagctgtgcacctactctaatcactcggatacttcacgccgttccatttgtcctaacactggaagtcagagtgcctgggctcagttttcagagtcttgtcttatttcctacttcttaaaaagtaatacctatttaaatttagaaatttttctccttccaaactaaggtcgtcagagcgctgcatggcctatccagtagagatagactttctataagatataagagttcttggagcctaatgtattatgtggcatacttcaaattctaattttaaaaaatatttctttttttttaaagatttattcatttattatatgtaagtacactgtagctgccctcagacactccagaagagggagtcagatctcgttatggatggttgtaagccaccatgtggttgctggggatttgaactcctgaccttcggaagagcagtcgggtgctcttacccactgagccatctcaccagcccaaaaaatatttctttaccagacatttccaatatctaacattgaaaacaaaatggaaataagaaggtagaaaatgttgagaatagcaaaaaaaacccactaagaaaataattaccatttcaaatagcaaaaggtaggggagtgctcacgagaagcagtgctggcagggagggtagctcagtggtggagtgattgcccagtgtgtatggggtcagttccagcaccaccaacaccacccaaaacctgaaccctgaaggaaaacattgaaaaagactgaataaatccaaaacgttgaatatacagaaatgacagaagacctgcattcaagatataaaaagaacttctcagactaagatgaagaaataggctggtaaggagagagataaaaggcatgaagaggctccaggaagtcaggtagcaaggaaatatggaagtgctcatctccagcagaggtcacagaggcataaacagaacaggagcatcctgagcccggcagcttagcagagctcagcagcacagcctgtagctggaacaaggagtccataaagctgccccagaacagactgagagcagctactgacatggttgtcttagttaggtgtctactgctgtggtgaaacttcatgaccaaaagcagcttgaggaagaaagggttgatttggcttaaacatcctgggttccagtccactgggttcaagcaggaacctggaggcaggagctgatgcagcggccacggggaagtgctgcttactggcttgctccccatggcttgctcagcctgctttcttataggtcccaggaccatcagccaagaggtggcactgcacctactttgagctcggttcacccacatcaaccatcaatcaagaaaatgcactacaggtctccccactggccagttgtaaggcaaggaacgttttctcaattaaggttgcctctttctaaatggctatagtatgtatcaagttgacataaaaatcagctttcacatggatgttttataaccattcaccctgcttctagtattaggctttggaaaacaacttggaagaccaggtgtggtggctcacacctgctaccccagcagggaattggcagatggaagcagaaggatgcaaagttctaggccagcctcagctgtgtaccaaggctaagggcctgtcttagagatccagaatacactcagaagttcccgcaaaaaggatagggtcatagcttagtgcagagcactggcttagcatgcacaaagctctgagcttgtcttcaacaccacagaaaaaagagcaaaggcctaagggattataattgacaataaacaggatttcacaaaaggcaaggcaaaaagaaaagagcacctaaaaacccagccctccaggtggaagcaggagggttgcttctaggcctgaccacactcaagaatatctcaaaacaaacaaatcagcaaacagtaaaaacctccttgtgcaggtatagaaagatatgccaaaaatatttctacaaccaggtatagtggggaacgtcttcagtctcagtactggggaggcagagggaggcacaggtctctgtatctacagtcagcctggtttgcaaatcaagttctaggacagccacggctaaaaaactacaagagttgacagctgatgggtcagtgagtaagagtgcgtaatgtataagcatgcagcccaggttcaaatccccagcacccacataaaaggcaggcatagttgcatatccctataattgtagcacttagtaagaaccagatgggccagccagcaaaaccaaagaaacaaggtcctagtacagtgagagatgctctctccagggaataaagcagagagcgatagaggaagacatgcagctttctcctctggcctctacatacatgcacaaaggcatgtgcacctacatgcaggcacacacaaaagtgcatttgttacatatttgtaacaacaaagaaaatcatgttatatacagtcaattaaacactctggagcaattgaaataaatgagccacagccacattcatcaatacagataagtttgaaagcaatattgaacaataaaagcaaattacacaagcttgcctagagggtttatattcatatgtgacaacatgacacctcagccatggttgggaaagtcaggcaaactgtaagctttttctgttggaaatctactcagctcacttagcacctgccatgtgctcccagcaccttttgcaagttgtcccctgtgttaacaggtcttgagagatcttgtcccttgctactttttggctcttccacacccatgggacatccctctctcactcagcagtgactcctctgtcctggctggctcccaaaggatctaatggcagattagtgagaagatatgaccatagtcatacttaggtcccttggtgacaagatattcctgggcctgacagtgtctggaacacaaagtaaacttgagccaaatgagtattctatattctctcatcagtaaataaagactgggggaggcagagaattgaagctgggagctagatctactaacgtgtggtgtatggtttcctcactcagctcttggtgactttctgtttaaatagcagtctgagggaaacatcccttcctgtttccctcgtgcctggttgacccaggctaaacatccaaatcacaactagtgattggtcctaagttaccaggagccctttctgcctgcaagttccaaatctaaccctggaccttgactctctaccacaagttcatgttcccaaatgccttacagcccctgagactcctgaggaatgaaggtggcagggctgtcaggctgctgccctgggctgttgtgtgttaaggtgaggaggaagtggaaccttgtgactcactgggtttggctgtcgtgttaatgtaagctttttcagatttaaatgcatgacgtgtgtagtctagttgtagcagttgtctctagtcagcttctgtcgggaccttacgctgggaggggctggcaacaaggtaatgcttctgcagtccgctcatccagggaagaagctacttccagaaaatttatatttacttaaaagataaataattaagatgctgggttgttttccatttttattagcaggtctagtttgagagagaggggaaacaactcagtgtatggaatcacagtgggctccatggggtttttaagacatttcactatttttaatcatttagggaggactgcctatctgtaaattccttacaaataattgtattgcacatttaagtgttttacttatggtggatatccatacagagtggctataaaatgagatagaagcctttactgcataagaattgtttttaaaatatgtgaacagatttttctcatgtacctatttttgcctacacacaaattctaattgactttctaatgtgttaaacagaaaccaacatacaatgtggcataataaaacttagcatgaggaaattcagtatctgctacagtcatcccttggtatccctcagagatggttttcaggaaccccagggaggtaccaaaactgagggagttcagatcccatgcataccttgcatagtgtctgtgtgtttcttacacagtccccagtgcagttgtccccactgcattccttctaactccgacgcctcaactgtgtgtgtgcaggtgtaggctgtgtgggggaagtcccgcatgaaaccagcccacaagtggtttcctaacactatccattggttagatttgcccctgcagattgtgtgggtacagagggctgccagtctaaatccttaaacttttcaacacactcccccacctgaactctgctggcacgagcctaccatggccagtacatggtagctacatgtgaaatggtggtaagaaaatggggcagcattgaaagaatccatttggaggctgcttgttgaccaggtccagttgccctcgtcctgggtgatgttggagctttcactggaactcagtgactttgctgccacaccgccaccacctcctcccttcggttttcctgtcattctgctctccttcccctccactcctcgtgctaaaccagtgtgaaccagtctgggtctccaccaacaacctcgtagttcagccttctctcccagagtacaaggaaggctgtggtggcctgcttgagccatgacacagtggattggctatcatgcccttttcacggagctggtccttctcctctgcttcctgcagcttcctcagtcttgcttggttctccagcaggtaccacagtccttccagcctgtgagtggtggtcatggtggggtcagttggagtagcaagctgagcaggtcaggcatggaagtgtgctgtgctttgctcccaagaatcccaccgtggactctcgaagccctgggtacatagaagccagtgggaggcctcatcgcagtgctcttacagaggcctagaatgaagaccagctagggcctctgtagccaggagccagcaaacaccctgggcagaccaccgtggttctttcttctctctctttcgtcagggttagtctcaggaggaaaatgctgaagaggccattcgtgcacactgttttccagagagaatattacatttacattgactgctctacttttattttttgaaactttgttctgatttcttaggctaacaaaggcatctgtcgtgtgtgtgtgtgtgtataatatttgtgtttctttattagtataagtaaacacttttatttgttgttttgttttgctatgagtttactgtctgctcccaattctttgaatatctgtttatgagatgaaatgatagtatacttaattgacccccaaaaattccaccagagaactcctaaacctgatagacaacttcagcaaagtagctggatataaaattagctcaaacaaatcagtggccttcctctacacagagaataaacaggtggagaaagaaattaggtctgtttatgagaaatgttacaataaagaatacttttctaggctgggtgatggggtcagccaataaagtacttaactgtgcaactaggtgaacctgaatctgatcaccagagcgtgttaagacaccaggcatgcttttataatctgtaatcacacacttgtaatccccacactggagagacagagcagagggacctcacaactccctgctcagccagtctggcctacttgattagtgaaagactctgcctcaagaaaacaagatggagcacatctgaggaatgacacccaaggctgtcctcggccttccacagacacaccagactcacttccatccgagccccaggaatgaaactgtgagacactattggtctctggtgcccactgaccattgagacccaaggttctttcatccccaagagctgagggcagccatcctgtcagtgcagccatgctgagcatgtgtgcaggaggcaggggagagcaagagcgtttgcgaagggccagccctgccagcttgattagagaaagtcagggtacaattgaggagggtggacgggttcagagaccaggacagacagagacagtttttcagaggtggccagtaggagtcaggtgaagctcttttgaataattgatgtaattatgcttcccctaatggttttgttagccctgggcagctcactgtgctgatgcagctgtgtgcttacaagcagataaaggaaaggacctgactgagctgtgggctccatcagtcaaagaatgacaagaataaggaaagtgtgtgagacacatgcttagtaagtgcctgctgtatacagaggagggcactgtgcattgttaccaagtgagcaagccttgctccagcactggtccacaagacaccatagctgttttgtgacagctgagtcccccaggactgcccaaggccactctacaacaactgttaactcctggtctcagtttcataaccaaataggcgggtctgtggcctctcacctgtgtggccatctcgatacttttccagttttctatttttatccttccgacatttgtcacagtgaaaagctgaatccttatcctcaatggagaaagatgtggatatttttttttaaccaggaacaactaagccttacccagatgcacattatctcaggacgcccacgccctttcattttggttttggagttttcttgttatttgtttgttcatgggactttttgttgtttctgttttgttctggtttaaagttagggtttctattgctgtgaaggggcaccatgacaaaggcaactcaaatcgctcttctgctttgaattcctcaggggcttcctatagccctttggattaggcctagaaggcctactcatgctcggattgtctttgcctgtccctgctgacctggctcttcttcctcaagcagccccttttggagggaccccggacattgtttgtggtgcttgctccctctctttgctttccctgcctgatccctaagtgtcctgttccttccttccttgtcctttctcttctctacatcacatctgaggttcagtctggccacccagccgtgcacactcacctcacccacacactaaacttcttttttgggtttttttttttggttggtttgtttgtttgtttgtttgtttgttttgagaccaggtttctctgtatagtcctggctgtcctggaactcattctatagaccaggctggcctcaaactcagaaatctgcctgcctctgcctcccaagtgctgggattaaaggtgtgcaccaccaccatctggccacacgaaacttcttgttaaagcttatgcacatggtcgttccatccatccctggaaggcatcgaatgcccatcctccttgcaagatcccagtagtaacgaggtcattcacgactttgtccatagcaactgttggcagcctgtttgttgactgactcatgtgccggttgtgttgagaatcatgtgtgaggatcttttagttcctgaaagggttgaaacactgatgttgtcctgaagaactactttgtgattcctttgttactgtacaggggagagcctgagcaaatgagtcgttgcccttgttaccagcctttccatgcctcaggttttgactggatgaaggagatgtgctgtgttggtgggcagtcctgccttcgcccagttcaccgactattgaggaagtagaattgtgctgaacatataagacgccatattttatagtctgtgctgctcctacagacacaataaaaatatatctggcacatttaacataaaattgaactgattctacatcgacagaaatcatagccctttctgctgcagaggaagtcagtcttattaggaattggggagctgtccagtaagacctccccatgtcgtaggcattatccacttttactgttggggtctgactgtctcaaagcacctgctccttgtacctcttactgccaagtcacagtggccatgtcatcaagtgacactactaacttctgcaccagctagccagatgcccttgccctggttgctaaggtctggatggcattgctcccacaaagcaagaaagtgtgtgtatgtgtgtgcatgcattgtgtgtgtgctgtgtgcgcgcgtgtgtgtgtgcacatgtgtgtgtgcgccatgcagctaacactgcctgctccttttcttacagagctgcaggaactggagggcagcagtcgacctgtgtggacgcctgctcacagcccacggacaaggctatggcaagaatgggctgcccaccagccacaccacagactccttgcaggtgagagctcctattgtggtattacctggttcatcatcatttggggacatatagggaccgtggcctttcatgtaaggtgaacagaacgaggatttccacaggcccttccttcccaaattaactgcatgtttaatccttcctaaaagacttgagagtctgtctccagcaagcatagagctcacctgttctaaaccgaggcatgtgaaaggagagatgtacatggaagaaacctcctctaatgaggaacagccttgaaagtccttctggactccccctcacactctctgccactgagaagagcttccagaggcctatctgtggagcagcctgtagtaggcttcttgctcagccccgctgccctcctgcctcctgcccctgtgtctagagtcacactcgggggaatggtgtctagcatcctttcatgcctctactcttgtttgtaaagtcctgaccagtgtgctcttctcagatacagtcctctcactgtcctgaccatggcagcttccttccaccccattgctcagtggattctccccatctgtgggtcagtataacgccccccatgtggtctcatgacaggattttctgttcttagtttgataggtattccaccaaagcccatacactgtgtttgccttacccccctgtcctgtcggtaagggaagaccagccttcagtgaggatgtcactctaccctgagtcctctctctctgctgggccgtcagcattatagccttgggtgctcaccttgctcacacctcacagaccaccctccaagcctatggtcgtacccttccctgaccttgcaggtcctcctcagagtcagcccttccattctgaagggccatcctccgccaggctgagtgccccacccacccgtccctgcacttctctgctgtccacactggtcccggtcccagcaggaagcggggatgttttctcttccttagctgatgtgctgctcaggctcgcaccttgagctactgcattaggttcagttaatgaaattccccacgctgctgtgtggagctcagcagtgtgtttgtaagcatggaactgtgtaaactggaggacagcagtaaccgtagccctgagctctggctttcttatatagaggcagggccccacacaaggccaccacgacaaggacagggctgacttgggtgtcctatcctgcatttcagctctggtttgtgaggttggcgctgctggtgaagttgggccttttccagaatgctgagatggagtttgaaccctttggaaatctggatcaaccagacctatactatgaatactacccacacgtgtacccaggacgcaggggtaaggcagtgagtgctgcttcatgccaatgtatgtgttctactgtgctttatacaaacttcgaaactctggcttttctttaccttttcaaatctgaaaaaccaaatcagtagcctagcacagccaccattcatgcagttttgtgaacatactgactaggagtgattggtgttttctgggtctcttagaggccagctgacaagcacctgctagaacctgttacccagtgttctccaagggagcaccgccattgtgccacagccgcacaaaactgcatatgttcctgaagtttctgttggcagctgcaggaagactctgttcttaatttattttaagattttggttatagcaatggagggcatcacagtctctaccgtaacacaaggccatagcatggactgttctaggacaggggcaaaaagtaaggctggagaaaaggagattaaaactgtctagagccttttgtctaagtgtagtggtttggataagaagccttactccccagtgggtggcacttattggggacagttaagatatgtggccttgctggaggaggtgtgtcactggaagtgggcgtctaggtttcaaagccgccagtgcttcccagcacttgctctgcctggtggttgtgaatcaagatgtgagctctctgctgttcctttgctccgccatcatggactctaaccctctgaaaccataagacaaatcaaccccttccttccataagttgctttgtcctggtgctttatcacagcaatagagagctaaagcacagaggtggagggccttatagaggcctcaactctgcgtcacacggagaaagccatcttgggaggacattcaaacatatggaatttcaggccattctcattcaagccagtacaccatacttccctcattactgggttaaagtcccctagaagtcaacttaaggaaggacaggtgattttgattcacggtttcagaaggaacacagtccctcatggacgggaagtatggtggtgagggctgtgaggcagtcacagctcatctgcagtctgcatgcagagagatgaatggattgctggtgctccgctcagtctctgaattcactcctgggccccagcccatgcgatggtgctgctcacatttagggtgggtcctcccatgtcagttcagcactttgagaaatgtctttacagacccagagttacatctcctggatgattccagtctagtcaagttgttaatgaagaggaacagcccctgtcatatgcaaaggtctgacaggttaagggcgtcactgtgtatgggaactggggggacaaggattctagctagtctccttttcttgatttctcggatcatcaggagacaactgatttttctcagaagagtagctattttcctgaaagcataagaaatgtttcctcagtccatctcggccgcactctgccttaaccgcaaggttagcaactagtttcaatggggttttgtctgtgaccaacaaagcatagaatgtgaaccacagaggctcatctctcactggcaccaggctactaaacccatagtcacatagctgcacaaaggctctgtgctattcctggtgacattctcgagaattgcagatgcaagattactatctcatcccagtagcttctgagcactggacagctgttggggacagtctaagcaggtgtttgctgtaggagggataaaaagctcagctcccctgggcttctggccaccactgtcctgctgctcagtctcagcaggcctgctggcctacggtaactcagaggcctctgcaccacattcctctgtgaggactttccaaggaacaagcttccttgaaagatagcaacatgtttaagtccaggcatcgagtggtccgttgtcgctgtccagtttaaggccatatctcccagcagataatacagcttgaagaacatttaggtacccagcctgcagatgtgccacccgaagagcaggcagatgtgcaggctgaggagcaggcagatgtgcaggctgaggagcaggcagatgtgcaggcagaggagcaggcagatgtgcaggcagaggagcatgcgggtgtgcaggatgaggagcaggcagatgtgcaggcagatgtgcagcctatgttctgctcctgcccgaaattaagtggcacctggatgtggatgaagagaagacagaagctgtgcatcatgaagcagctatttcagattatgaaatggacatatatcatgcatgctcaagtgttaatatgcattcacggtgataggctggatgctggctaatgctgcttatcattttgtggcattacaagcataaatgtaagaattgattcattcatttcattttagctcacaatatataagcaaagcaaaccattaacatgtgcttttaaaagggggttatagtaatacaaacaaataaataacttttatgaatgagctttaatatatttcatttaagattgggtattatagcaattcatgatattcataacaagacttgatgaactgtgtgtggagctaatgaagttgagtttttttgtttgtttttcattcataaaagggacaatgctgtatttgatatatttctagaacatttaagcagtttctatccaatgttcagctgttctgcaagtcccattagctttgtctactgacccttagccccacttggtctactgtgcagagttctcttcttgctcatgggagcagcaaggaggacagagttcaggcagcacagccccagcattcacagtgtcctgtcctctgccctctgccctctgccctctgggcctgctctcccaccacacttactgctcttgccctgccaaggctgcatgtccctccccagcactgagggcccatgaattcaactcccattaccagtcctgccccctcctaaaatccgttccaaccaggagctcccgtacttccagatccaggggttacatgtccgcacatattcagtgaccatgcttgctctctgtgtcaggagcttgtcttccttggtttgggaaaaaccactttccctgggttgctagaattccttcctgggaggagatgtaaatatctgtccttcctcctaaagtcccaaggacacaagagtctcaatcccaccctgcagttccagagtagaggtgagggttacctacaaggcacaggcgcacctctgcccatcaggctgtacaggaagcctttgcccagccaggatgagggcttccccgagctacatagatggagccccctcctctactcttctctagcctgcattctctagaccctccctgagcttggatgcattcactcgaagtttcatagaacaggtggtggggattggctggatagtcagggaagggtctcctcttccttcatggtgggctgtaaacagtcagcaagcccaactgggacaatccttctggaaggggacgcagctgaactcccccaggatgccaatcacctggctcaagagcatttgaggcgcagtttagcctcttttcagtgccgggttcctacgaagactagcataggcatcgttgcacatctctctgtgtgaacatctatggggctctccaaggtctaagttaaaagtggttttactaaagcctgttgtgccagagttttcagtttagccagattgctgttaaaacagccctgcgccctcctttccttcccagcagcaagatgtggtttcttttccctcggcaagtcagcagcctggttggactgacttgctgggcctgagccccacctgttggtcttactcttcccctgactcctgttctgcggggcctcctccccaggggctcactcccacacaggctttgtttcctgctgctcatttattggtgttcttcccatggtatgggcatttagtcctttgttagtaattttaaagggagcctctcccattctaggaaggataatttccaggcctgcaggagggccctctgatttcagaggcccaacctagcctttttatttggcagcaactcctggtgggcccatgtactctatatctaaatcataatcctggcagtgatgttgggatcagactaggaattaaggctattttagtcagggtttctattcctaccaaaaaaaaaaaaaaatcatgaccaagatgcaagttgaagaagaaagagtttattcagcttacacttccacattgcttttcatcaccaaagggagtcaagactggaactcaagcaggtcaggaagcaagagaggccgtggagggatgttacctactggcttgcttcccctgatttgctcagtttgctttcttataaaacccaagatgaccagcctagggatggcaccacccacaatgggctgggccctccccccttgatcactaattgagagaatgcctcacagctgtctcatggtggcatttcctcaactgaagctgctttctctgtgataactccagcctgtgtcaaattgacacacttaaacagaggcacatggagacatgtaccagagaactttctggaatattttctttctttccctctttccctctttctttctttctttctttctttctttctttctttctttctttctttctttctttcttccttcctttcttttatgactgacaatttgttttaaagatttatttattttatgtatatgagtgcactgtcctgtcacttgctgtcttcagacacaccagaagagggcatcagagcccattacagatgtgataccatgtggttgctgggaattgaactcaggacctttggaagagcagtcaatgctcttaactactgagccatctcttcagcccctggaatattttcttaactaagccacagcacactgctgccctggttattgcccagacagtggcatagctctaggtacatgaatagtaatccccaggggccatagagagctgttggcaactgcacaggtgccctgctctctgtggagacctgctgttctccctccctcaggtccacttgccactttctccttctccaacaaaaggaaacagcaagtacacttagcttggcagatattcctgtggaatcttctgcgtcaaaatgttttgggcccagagtcagacaaccctatgacaaacccagatttgtctcagctatccactgctacttctgtactcccagggggtatcgcaccctccccaggagatggctgccaccccacccctggcatggagggatgaaacaaagggatcaggttatgtaccgagcactagggattattttggttttgtctgtttttctgcaatgttcaggacagaacaactgctcttagggacttaagatcgctttcccaaccctgttctctgattggctttgagaaccttccttgtaccttctgggtgccttctgggtttttttgtttttgtttgtttttgtttttcgagaaacccttcgagacagggtttctctgtatagccctggctgtcctggaactcactctgtagaccaggctggcctcgaactcaaaaatccgcctgcctctgcctctgcctctgcctcccgagtgctgggattaaaggcgtgtgccaccacacccggctttcgctgcagtgcgcaaggtactgcacatggtactgcgcacgtggcacggttgtaactgatgaccagccactgagtcgtgatttccagtgagctaactgtgtgcatttgctgtgtttctgtctttggaatgcccgcacaccaccactttcagtctgttcagagccctctccgtgagaaggaaagactcgccatggctcgagtttggggtttccatggcgctgcttatctttccatggtcccttccctttcagtgcatgatctcacacgggaaagaaaacacattctcattatctcagtgcacctgccagcggtgccccaatgggctgtggtctgtgctaggttagggttgcagcgcctgccatgctgctatagacactcacttctgaacttagacctgaggacagatcaccctcaaatcatcgagccagatgtacagactctcgaattaactgagtgctaagtttccgtcctccctgctgccatctgctcctcgaaattctcacccagtcttcagtcttcctctgctccctccagtgtctgcagctcacaggtctctttctcaggcaaattctgaatcttttatatccacacaaaacctgacatggctgcataatattgtaaacatctggaatttcattctttactgcaaagtcagtttacctcccacagctaacatgttaggctgacattagatttagatttatagttcacattactctgcctgaactcctgagtaccgagaagggtgtcctcctgcttcctgcagctttctgtttccccgacacttgcgacagttgagaagctacttggagcactacctggattggatgacctagtccatattttttatcactctacctccatctaaaaaaatttgatcaaataataaatatttgatctagggtactttttgtttacataccaatgtagcattaggtggaagatgtcttcatagcattgagagtagtatgtgtccttgaacactctcacacagcggtatctcagcagtggagcatctcagggagactgattgagtgatgagtatccccatcagctgccaacctgctccccccaccccggtgatggggaggaggataccagggaggggagagggtgtccagggtctcctgatggatcagtgaatctagttaagtgtccctgttacaaaaatgaaagaggaagactgagaccaacctgtgggtctgtgccttagggacggaagaagctacagtgggactctccccacatgctctctgttgccagtggcgaacatacatatagtgttgggtacatggcagcaagtccagctgtgcctctgccccacgctgccaggagctgcctctctccgagagcagcagtgacccatggaggtcacacccatgcggctctctgctttcggttttcagtgcacacaccaaggcccagcagatttctagcacattcctccctgactttccacaatggtggtgtagcttttcaacactgcaggggacagtctgaaataatcttcaagtagttgtttttatttaatgtgttctctctctctctctctctctctctctctctctctctctcttcacccaccaccaccaccccagcctcatttaatattttctaaacaactaatgagaatacttcctcagtattcatgtcaacctatttttagacaggccccgactgtacatgggagacacacacacacagaggactagggtcttcttacagattttgactggccaggctttgttgtactgggtagccaaactgaacctgaaggatgctgaaattcccagcagctgagacaggcaagctcgtccatacttggggagtgtggtggcttgatctgggcacttgaatgcctggtgcccaggtagtggtgctgctagggggcgtgtaacctttctgagggaagtatgttacacttgagtgtgtgtttacacttttagagacatgttgtgaccagggactggcctctacttggttcttaaaacttgccacgtaacttgtaagttaaatccgtttgcttagcatggaactgacagacagtatttcccagctgttctcttcctgtctcagttctagagcttcctgttctcctatgtagttcccatcagtttcctctttcgaatgcagccacatgccttgtgctgatgggcagtcctgaagactctaatctggagaagcctctagtgtgccagcagacctgtgagcaggaaggacaccttttcctgctcctgctctagctccactctgtgccaagctagcaggagcccaggatggagagatggcctggctgagatgtctggccctctctggcagcctcaggaacaccttctgagccctgttctctgagcccaggatagggaggtcccttcactgagctatctgccccttctctggcatcgccaggagcacctccagagctagttgctttctttgcagccctccctgctgggaaatacaaatccactgtcttagtcaatgtttgataccatgaccaaggcaactcttataaaagaaagcattcaattgagggcttgcttacagtttcagagggttatttcattatcatcatgaaaaagaccatggccatgcaggttgctgagaacctcatcctgaatatgggtgggggggggggggccctgactgagcttttgaaacatcagagtccacccttcctttaaggccacacccccttattctcgtaatcctttaaagtcactccctggcaactaagcattcaaatgtacgcgcctatgggggcattcttattcagaccaccacattccctctccactcacactcacactctggcctgctacagtaatgtactctgtatagctttcattggtggccatttggtatctgctactgaatttatttgtgagaacctctgaggttgctgcagagctgtggcaatagtggtaacatctggtctcccttggtaattggctagatatgtaagatatgacttagcagagaaaaccagcttgtattctacagctaaaccaaaaatcaaaggacttctgttcttgcttccaatgcaacacctgtgtgctggctagtgttttgtcagctaaacagacagagagccttagttgagaaatgatctaccagattggcctgtgggcaagtctgtgaagcactttcttgattgatacttaatttgggaggacccaagttgtcggggtccgtgccacccctgggcagggggtcctggatgatataagaagcaagccagtaagtagcactcctccatggactacaaactggaagatgtaatattgtaattgttacattttgatcatggtgtttcatcacagcaatagaaactgtaactaagacaccctgtaaatacttccttcctctggacagtcagaaaacacacacatccatagcaagctcactaatttacctgtggtttctactctaggctctatggtccccttttcgatgcgtattttgcatgcagaactgcagcagtatctggggaacccacaggagtccctggaccgattacacagggtcaagaccgtctgcagcaaggtaactgtcatggtgttcagtcctcttcctctgagcattcacaccacggcattctccaccggtccccaagggaaactgtctcacttcttcctcatacacaaggttctggaatagtgtcactatggtatccatacctaaagtgtttgtcaaaggctagagactggtttggggctgagccactgtaagccagttgcccagatgaagctctgctgtcttgaagactcacaaggactggacagtgtgtgtatattccacgtgcctggcttagatcagggcgatgctcttatgcagcatcctcttatatggagacatcacttacttttcataaaggagtacagtgatggttttgtttattgcctttgagtcatttggtgacttctcgtgtctggtttaaatggaatcagtgtactacactgtcatgacacagaagcccttggctgtcactgtctgcagatgcctatcttctgctttctatgcctccctttctggctctgcagactgtctgttcctccaggtctcaccagaggtttgcaaactgattgggaaagaacccacacagcagagacattcctaagagccatttgcataaataggtataatccataaacagtaaggtacaattagcttgaggttaatttcatttgccagtgcagatgaaccacccctactccacaatcccaggtagatttggcttcgggtaacaggtagaaaggtttccttagagcctctgctgcagcagatgaggctctgtctcatgaactcagaaaaagaggcgcgtgggctgggagtgtggcccgcttctctgctgatggctgacaagacagcgtgagagctctgttccaggaagggttggtgtctttgctaaaaggggtttctgacagatgggcgcacttgggcttgccgctttccagtagacaaagttagaaatacaggacaacagccaccaccatcctctcctcgcgggccggctcgggcaggccagccgtcagccccctgatggctctgcccgctgctgccgctcccctgatccagatgctccactttcccactgctcctgcggagaacaaattagctgtgacttaatcagagacgatggggcattcggcaagccacttaaagaagcagaaagagagactgaggagcgcttcatccctctgggctgcagacaggcgccctgcctcgaggctcacactcctgccccgcatctgtctacccagagcaaactgccctcaacaaaggagctagaacttccatcagctgggtgtgcagggcggctgccctgctgggggtcacagcagaagcctctgattggcacgttgcaaatctcgggcatggacaagaaagccactgggcactgcgcagcagtatggactctcggtccaccaaagagctagagagggacacacgagaacccagagaaagccaggctttccggctagtaaagatgtcttccattcagtcctctttgcctttcttttcttagcacatgcatcccctccgactggtgtgagtagtaagaaaagcacacacagacaggaggacatctggagccacacaaactgggtggaaacacccaagtgtacatcctgaccaggcctggcctgctgtgctgagcaatgctgctagtggcctgcaccagtgaccactcaatgctggagcagtgggggtatttaataattcctcaagtgtccaagagcactctgagaagcctcttccctgtgggaagcctaccttccagaaggcccccaggtagccatggtagagacgggaaggcctacctattggtgtctcacatgtgtgtgctgagacctcatgactacagcaagcctcactcatgacagctcctgcaggccagggccccagcccagagaggtgtgcagcaagttaggacacctgcccagccacctactcagataactgtaaaactcaaagcaggggtcatggcctttaaatattgtggcaagcaagtggtaggggctgtatacagagtcatgcagggtgccaaagtcactccagacatcgttccccttggacacatagccttcccgtgctgtgggtgtgtagtgagaactatccacattttaggattggagtctgttattcaaatccaatctagtctgtgcccggggcttgggatccagaagagcccctctgctttagggagcctccttggcataggtaagtgccgcgtcaggagccctctcttccagccccacgcttcaccttcagtgttttcttcccacggcctgcccacttagttccaagtacctctttccatgactgaacttgatcacggcggtgagctcgtaagacacccaataataaaaaatgcatttcagcctctgcagattgaatggactgaaattctaacgtgtttcaactcactgcccctcatgggaagcttgaaactgaaaggtacaaggtaaccttgactcagctgcacactgcggtcggctgctgccgagcaaatgagtctgtggcttagagccgtctctttaatgttgattagtaggttagttgtgcctgctgctgggtgtggcgctgtattttggtgcatgcaagtacagcctctgtcaccaacccttgcctacttctaacttcccctggggagcaaataggccattgtgccttccatgtcacaccaatcagctgtgtctcctgtccactcgtctttgagtgggcagcactgcagcagcacccgtagggcacccgtagggcagacagttctcattcactttggctgtagaattgctgggtcatgcattaccgtgaaaattcaggagacagaaattgttgggcagaaaccagcttgttcagggtaggccctaaaggagacagagatgtcaggtctctcaatagatggcgagggccacagggagatgtgtctgtgttgcaagagcctgaagggactgtaggcatctccagcacaagcgtggctctgtcaggccttgcccttcccgcatcccctctgccttgctaaaatccttaggctacattccgaaagctagccaccaaagtctgttgttcccttatttggccacttctcctcctgaggctgactaccaaggtccagctatcaaagtattaaagtccaacaatcaaaccccccttttggccaccttaactaacatgcccaattcaaattagacacctcattctaacatggagttttcccttttccccttgtaaactgccatttgcctgtgtaccacagtttgtcctcgctatccagaggcagtcatttgtcctccagtcaaccactcctccccctcttccttgcctcttttctcctgtctgccttgtttctttccccttctcccttgtcccctatctcctgtcccttatccctgctctctgtccctctggagcaaataaatctacttgatacagagaacttgatcatggggtgccgtgagccaacttggcgatcccagtgctcatgctgggtgggccttaccagagacctctgcctcctaaaagtccccctgggtcctgacctgaggccatcatctgactttccccgtgggtcaaagcagttactgctctgtgagatgatcgtgtacactgaggggaagtggagcctcacagagtcttagaaagggagagattggctatggagggaggcagaagtaagccaaatgaggggacagatggaggacagaagccaaaccagagtcccccagaaggatgtcactccttcaaaacaggctgtcattctgcacattcccacctatgacattcagcatggtggctctgttctcggggttttaaaggccttacactcttgtttttcatggtcatgataatggatctagggcaggaactcctaagggctcaggcacccatcctggaaagccactcagagaaactagtcataaagtcagaaatggggccttattaacaccgtgaccataccaggaggagcagggttcatgtcctcaagtctgtgtgtaaagtggctctgttagcagcacagagacgccacggcaagcatgtggttccatagcggcgcccaggtggtcggtgggccacttgctgtcacctgggggcagcacctcatcagcaggcaccaggtattgctgggcaccaagaagttccctgtcacaggcgagtcttagtcatttgtcttgagtttgtcaacaggatctgttgatggctcttttctctcagaactgggaatatgtcatgccatcccctcttggtctgtaagacagtaacagctccaagatgtcaccgcacccacaggtttccatctggctccagtgcacctcgagtgggctgctaggtcgctccctcacacctgtcagtatcgctgtttgctcagaagaagcccccactccctgctttcctgtcctcatgtggcacctactccctcccaaaaagagagggagaatcccagagcactcatgccctgtcctgggagtcccagtgtcactgccacctgtttgagacagtaactggtgtttaagtgttcccccttgccctgttggccaagatctgtccttcttttggatgagtattccattggcgtccttcaggggagccctgccctccacacctcctccctcacagtgtgagcccgtgactctaggagcctagggtcaggtgtctggagaaacggctcccagtggcctcagtgtaggccacagcatcccacacagcctgctgagaaagctcccagaagttctagagacccacttactacttagcagtcagcaagcattagcctcattgctcccagatcacgcatttccaacccttttatatttgttacagggatgaaggcagaaaaaaaagaccacaggaaaaatctgaggcggaggagcagttttaatttttttaatttcttgttgctgttccgtgtaattaattttccctcggcacttttaaagtttacaaaacactataagtacattctccatggagccccacagtctgtaatgctgacgagaacagagtgttggggcgtccaggtgagaaatagacattagagatgataagcttaagtcatcctggacctgaagcagcatctcacggtgcctggagttaccactgcgcctgtgcctcactccaccaaaggcaggaagggctgggggaagagaagccgtttgtgctctgggctgacagcatcatacccatgattccctgtagtttacagcagagctccctgaggcgagggtgagctgtacagccctttctgcccagacaccccactcacccatgagaacacacattctgctttgtgttcactcagtcccgtgtagccactctgcactgtgcagtgcctagtcctgtgaggtcactgtcccatgttgtcatttcaccctgcattttgctctttacaaggtgttgtctcagaacagatttgggttgcatacagtatgtaacaaagtcctaaccactggctgaccaaaggaggaggaacacgtgaacccatgagttcaaaaccagcctaaggcagactgtaagatctgttttgtgagagggggaaaggatttcacctctcccaaattctaatggatttagggcaggaactcccaagggaccaagctcaagtacccatcctagaaagccactcaaagaactgagacaacatcttcccttttcttattacaaaataagctatccaactgacctgtagtcatagcttcagtgtcctacctgagagccgtgacctgggtttgcagattgcctgcttctgtggcactgcctgccagcacctttggctgaatctcccccaaagcttctctgtgtcatcacctgattctgggtgtgggggggcagggaaagagggaggtacagcttctgggtgaaggagcaactgagacgctgtctcatgcccatgtcggcattgtgggcactggctacagtggactctttatttcaatttggtagaggtgaaagaagtcctttcatcttcaggtttatccaataaaatacagtagaagtgccagccatcctcctgtagacctgcttcaaggcattatcattctgccacctgtgtttaatggggcctctgccctcagagcatgttccagaaccccagtacattgtgcctgctgagtggggcctagctgatactcgatctctggctcttgtttccaggacgagatgggcctgtgggtagaggtataccatattcacaaattcagcctctccctgcagtatctacattctctaaaagggtcagaaccctgcgctggacatgcccttctcactgtggtcacaaccttgggtggctgtccttcccactggtgctcaagccacttagtggcctgggacactgcagaccctggaactcttcacatagtccttacccaactcacaggggttgagaaaggctgtaagctgctcgagtctcttgtgctgtgtggacacacgctatgttagtgactgttcttaaaagcgctgcgacccatgcccaacacagaccactttacggtacagaggttgttttgattcatgatttcagatggttcaggctagtcacttgaccccatgtactttggcagagcatcacaggaagattgtatggcatgagcagttcacttgataacataaatagctagggaaccaaatggtcccaaggaccttttcctggtacctgcttccaccagctaagccttactttgtgagatttctagaacctctcagtagtgccaccagcttagcacgtgggcattaaacaatgaggggggatcattttacatccaagccataacacatatagaaagaagaggattccacagagtgtcacaaggccaggaaagcccagagcaggtagtagagtcctcagtggctctgcccttgccaccccatacactgcagtggggagcccctccttgttcccgattctctgctgctgctcctatgaagtgccccacttctccttcagagccagaacattaggcagattccaccctcccagtgggtgctggctgagctcgccagggctccatagatacagcttcccccagccctgaatgcctagtacagagatcggactgttctgaaatacatggtgtggtaggcttggagcacagttgtgcacatagatcctccacggccctgagacccagagaactgtcgccttcctgccgtgtgtggtttccgtcctaagtgtaaatgccagcctttggtgtgtggtttctgtcctaagtgtaaatgccagcctttgtcctagttccctgagctctcggactcggtcctgaatgctggtgccctctgctgtccctgatcccttcccttccctcttggctccgtgcactccagcctgcgggggttaagacttcagtcccttgtcggtttctgccttcacgattacttatcagaaaacaaattagctgggacatgccatttgacctggtttgatctggctcgtttctctcaaaggtcacagtctttaaccccgtgtctgtcccctgaatctctcagaggtcacagtcgtgagccccacatgtttccccgagtcacattccacagctaattgttctcttgcttatacaaaataatgactttacaaaggagggtgcccactgtggcatggatgagtgaagagaggacactcagtggtgccttccactgcctacctgcctcctaggggtagcccctggggtaatgtcacccagcaggtgggaggaggaaggctgggttttccacagagcagacagactgcatgaagaccttttccatgaacattatgcctgttttcctcctacacatagtctttactcttaacatatattcacaccctgcccttcaaagtaataatagaataataaatcttttccctgtgtcacagggaccatagaagcttttctttcagggaaaacccaaatacagatgaaacaatggaaaggttttaaccaaacaatcaaaactatgcaaagtaccagctttacaaaatggacccagtgctgaagaaaaggctggaggctcactggcaccccggagaaaggcggggctgatgctcccacagcacttgatcactcttgtgtacagcttttcatgaaaagaaaaactgaacgcccacagtgttcagtgtctgagaaggctctatgagtctcataagcctaaattctaccttccaccagagagtagggcctgctcttctcgttacctcctggtaactggtagacatcacaatgtaaaagacgcatctcttgtgaacattccttgcctgattggttttcaccaagagaaatttgctgtgtctgaaatatatgaggacagtgtagccacaaatccacttacagttttgttgtccttgtttgaaatgactgcagatcttggccaacttggagcaaggcttagctgaagatggtggtctgagcagcgtcacccaggaaagcaggcaaggtgagcattgcccttctgttggctgaacaccactcgctcgaatatgcaaggctcgacagtatagttggtccccactcttacccaacagtggatgtccccttcacccatttcccctgtagcatctactctggataggtgagaggaaggacatgggcttttacccagtaatgagaagtacacatgggctgaggacagcccaacccagctcctcggtgcactgggggcttttcatttgcctgcacagatttgcatggaagaggggaagtaggccacagtgtgaactgtcagtggctgaacatcctgatcttccatggtaccttggcaatcacctatggacacgtggtggactgcaggggcagatcagcctctaagatcatgtctcagtctctttccatttgctgtaatgaaatacccaaatctggtttaatttataaaggacagagtagtactggatttacggtctagagtctgggatgtccatgagatgatgctggcatatggtgagatcatccacattgtacagggcatcacatgatgagacaaggaagcatcttcttagctctgttataaaaccgccagtgaggccaggcacagtggcatatatttttaatcccagcactcaggagacagaggtaggagatttctatgaattcaaggcccgcctggtctgcaaagtgagttctaggacagcagggctgttacacagagaaatcctgtctcaaaaaaaaacaaagataataataataaaatcataataataattaataagtgaataaaacctccagcactgtgataaggcctcatctgaggactttacctaacctcccaatgcctttccaaggacccccccatttcagataccatcaacatgtggctttagggattatatccccagtatgtaactttgtgtacacatatctaccacagcagttattctggctacagcatgctgaatacatgccagtccctttcagcacgtttataattccctggatttgaagggttgggtgtgtatgtgtgctgtgtgggtgatttatatgtggtgtgtgcatgtgtgacgtgtgtgtgtacatttacatgagtatatcctgctattaactaggctctgacacccaaaggtatgaatgtatctgcttgccctagctgatgtaagcagtgtagtccccagctcagctcttactcctgatgacccaggaaccatcagtcagccctcccctcacttcaaatgtctgtgaagggatcattccaacacagagggggagaaccagtttgaaaaccaaagagatggccagtgaaggttctgaaccagaacagaagatggccggtatcagatgtgagcagaggtgcattgttcacggtctactgcatccatagcggtgggtactggacttatcctgtcctctcatggagcgcttttatggccacttctggtgtccatcctcagtaaagcctgtgaaaaaggcagaccagcattgttccaatctgaaactaaaggcctagggaagtggtcagttccaggttgtagggactaaaactgccaccaggccctggttctccacagccgctggacacgagcaggcgatgtgcatgggtcagcttctgccctgggcagcagatgctgtctctgcatcagacgtgttcacaggtttaggattgtggcttagaagtgagctcctgatgactgcttggacttctgtgtaagctgggctatatttcttgctgagatggtctcttatgggagcccactctgggcatcccactgagaacactgtcctctgtctccggttcttggggagacctggtaaggttaggcggggaggcggggggctttgtgtcagcacccagagtgcagcagttgccagctcgcaggagcacgcttgcttgtgcacactcacgcctctctctcccctgcagcctctgttcagctgtggaggtctcgtctgggccgtgtgctgtactccatggcaaactgtctgctcctgatgaaggtatgtgggcggctgagctgtagagcaccttgttctagcagacagtgtcagctagaggctgcaaggaagtgctgcgtgttccaataggcctgacaaggaagtgagccgtgggcctcagcagtcttcagtgtggcctagattgctcagtagagttcactcacacttgggggcctaacttgtcgttgtaaaatttccacagaaaacagtttatattgctgaatttaattgcaccggcctaggtctaaacagtctaattaaaactgctcactccgcccgaaaacgggcgttttcctctgaactccatccagaaaatctcgcctttgttctgattgttttactgtgagggtcattttttaatgattgatggatttgacatctgaaggcagtctttcccaccagaccctcttgtgaggagctcaccccgagctgtgcacctgaggagccagtgtgactcggggagctctgccgggctgtcagtcactgtatttccagtccattctccacgtgggccctgccagcgggttttcagcttctctctcatttcaaatacatcccatgcctggcttgcctcccgccctgggcacgggtggcctgccactgagctggcggccttgctgccagctgcaggcaggcactgaagccaccacggaatctgtcagcagcagacgcccagagcagcgctgttaacaccttccgggctgtggtgagacggctcatcagttctccctcagccaaggtcgtcctgctctgactgagcggccgccagcgggcaggttaccaaggggaagagcgtgctcctcgctttagagcgactggcagccctccacgtggccagctccttggacctggcaggaaagtctgtgaccacagcccagccataggacagtgtgtttcctctgcacctctgcagacaggtgacatgtgacattgggtgtagacaggctcttgtagtaggtgaccttgacacagaagaacgggtttcctaaaacctctccagctgtcctcacagctctttcctactcttgaacacattacagcttttagaagttctgtgtgagatatttgcacatggtctgttgccacagggccactttgttcctggtatcttcccacatccgcctccctggtgacatcattgcagagcctcccctacctccccatgggctgcagccctcagccaaggaggggcctgcttccttctgtcccaccgccccctgtgaggcctgcctctcctcactgctgtggcctgtagcagcctgagaaggcaccgggagcctccagtctcctgaagtctctgagccttggttgccttcttaggcttgcagcactggtggtgcccagccacaggctgaagatgctcagggaggaagtcgctgctcagctgcagtgcactcagcttgcctttctgagagactctgttagaaaatagtgtaacaaaaaaacgctttcctttgttttactgcagtagtgacaccgccagcaatgtaggcacaggcaccaaacgtctgcctgtgacatcctgtcacccaaggttctgaacgggacggattatcatgtctcaaaaatactttctccatggatgtaatttaaattaaaagtttggtttaatcttgattttcatgagttaaagaaatgctgtaaggaaagtggatgtgagcacatgcattctgctgccatctagtggacacaacaagtattgccacagtagctgggctgcatagctggggcctgtgtgccagctaacaatgacctaattaatcagccttttaatgataagaaatttgctcatatgttctagttctgagagtcccactatatatttccaggaacacccgcttgcaagacaaagcccttcgttcataaatgtgatatcctgaggtttcacagtagccataagatacctggacagttttcagcttcacgtccttatacctcccacacagcattgactattgtggcttctcttttgtggggaagagcctgccacacacagggtgcctcctctttgcttggaaaacactacataaagcctttgttggcaacagaacagccattaatacaatttagcagtcactcagccaatgcagtttttaggtgcaagtcaggcaagaatgcttttgcccacatatgagtgtttgtatttctattcaagggcaggtcagtgtagtcagaagagtagagcggacacactacaagaagctgttgtcagctggcctccaggttcccagaatgagtgatttcattgactaacagccaactaggtggccctcagtgacagccctgaacactccctctaacccacccccccaggcttgttgacacatgctaacactgatgccgatggcacctgcctgacaaccccttctctactgctgctttttcggatcagtcccaaacctgtggatccaccctgcctcctaggagaactgtaaaattctatcaaaactgaacctggtggtacatacctttaacaccaacatgggagacagaaacagatggatctcttgagagttcaagaccaactgagtctctatagttagttacaggctgtacagagctataccgtaagactcagtctcaaaaaagttatatataatgggtatatttatagcctgtttcttttctgttgggccattctcagtagcatgtacccttgaccctagggcaagtttgaaaggcagcaatgccaatcaaaaaatctaggatcctagcagggcttactcctgaggcatactgaccctccatgccatgcaccctggccctccatgagctgtccatcagaagcatcatgagcagggtggagcctaggtcacgatggcctgtgatcagatgcagtactgtgactcggcacagcctgccctctgctcggtgaaataaaacgtaagggtacgtaccaggttggaggaggagaccaggatggaccttaggggccatgggctagaccctggtcagcctgagagcaggccctcaagccgcacagggtggcgtgtccgtgtcccctcagccgtgaccctgactgcccaaaggctgccttctcccctgacacctcatggtgcatgcacacacacacacatccacgtgcacctgctggcacaatgagaaataaggccggctggccttgggcggggccgcagtgacaggcagcaaacgtggtaggagaggaaatcaaggcatgtgtggtctggctccttgtgagcatcaggccttgaataaaattagttttaacgagctgcacttgaaggtaccagactggagagtcttctttttttttttacccctgccaaactggaattttccctgtcgtctgtctctataacctcccaattagcaagctcagtcgctgtagtcccagtttagaggaaacttaaagtttagaatagagaaataaataccttccagaatcttatggttaggaggaaatgagcagtgccagccttggactggtcaccatgagctgtaactgagaggaaacaagtgcttggcacggctcttgccacagtgtttgctcggctacacgctacagaggctggaggaggagctgacctttgaaccctctcactgaacccaactctcataccttttcgtactgtggaccaaaagtgggaagtggatactaggtgggtggtagagagacttagcctcaaggaggggctgcaggcaggaggggtgtgaggctgctgctaggaaggtgcacagagctgaagcactgaagacaaagctcaatctgcaggatacagacgccaaggccacagcgccttcagtgcctctggacacctgcctctatagagcagcagtaactacatgtcattataggtcacagtgacatccatatgccctcaccgtcatagtaaagttaattggtgggtcatttcaatgcaggtattttgcctcaatattgagcacagaaaagtgagacactttcaaagtgtggctttgtgtttgaaggatgaaatggtgcagaactacgagtccttacaacagctctgccagaaaagagggagggaccaaatacgggggtctctggcttctgcttaggaagtgggagcaaaaagcagcctttgggccagatgctaggtccagagccctgtggtaacaagaggatgtatgtcacacagaattcagagtcctcagtcctaccaccattggtgggaggggtctagcactagcctgctgcccccacagctctgtgtgtgtgtgtgtgtgtgtgtgtgtgtgtgtacgtacgcgcgcgcgcgcgcgcgtgtgtgtgtgtgtgtgtgtgtgtgtgtgtatccctggaccataatgcactgcaaagcgctgtacagcttctccagctcacgacatgcttttggtctcttaccataggactatgtgctggctgtggacgcctacctcacagtaatcaagtactacccggagcaggagccacagctgctgagtggaatcggccgcattctcctccaggtactggctacactgctaacagcccaaaggctgagtgcagtggctgcaatcctgtgaggttgcctgtgaattctgcccctcagaactcatgcaaacaggcagtagtagggaaatagttcagttcaaattcatgtgaccattaggtgttctttgcaatgattctgctgtgtggtgttctgtcctattgcagttagggtcatctgctaactgcagctgctgtgttgagggaacactcaagtgcaccctgacacagaggctgcagcaatgcataggctcggttcactaatatttggtacatcttcttgtcagtcccaggatcaggacctcccaggctgcccaggatatgggccttgtgtgtttgtccctggaggggctctaaatctggggaaagagggtgggttaagaacagctgatggcaagaggagaaagagcccacccactctggcacatggcactgctacactcgtgacctcacagtgttctgcagcctgcatggccaccacgccttaacagcatctgtagctagaatgccttcctggcatgtgggagtctggaactcatgggtactggagtcctatattccctgactccttagcaaggctttcctgcttgcaagacccagaacacaggaggaggccgtctgcatacatatctgagaacactgaaagtacttgtgcagagtggggaatctgatatttgggggggggggggcacagtggcccaaggataagtgtccctcatttccacagtgaaagccacatgacataaggaatgcttagggacgcgactggcttcttcactgagctggagctgtttgctgttgagtgcatgggaagacaatgaagagggtgcctggctccatcctgaatgggatcccaagtcagaggaggcccctggctcattggttttgaaagcctggggctgatacaggccagtgctgaccccgggagcaaagaggggtagtagtgtccttagtagccagagaaagggcacaaaacaagggaaggaggtttgctgtgtagtggggctgggctgttcagccgagaggactgctagaggcccatgctccatctcagggtccaatgcaaaggagaggtacagtccttgggacatattgctccaaacaagagatatagtatctgggccaaggaatcagagcccaaagaaagcagatcttcaaggccaagattcctgggcacctttgagtttggcctgcaagcaatgtgatgctggctctgcatcttgtacctgttccctcaccctcagtgcacaggagtaactgccctgtcttcagtgagaaagaggagcagcctcctactgcagccatcccagcaggctcatcttcatcagtgtgacatggccaggcttaagatacgtggccatcccaccctgacaagtcagcagagtgagcccttccacagccatttttgtctctccgagtgagtgaagccaaatgtggacgtgagctcagtggccgtgcctggtttctgtctggggaagcacacttgagtcctgaaaagcagacactgatgcaaacaggccgaggcactttctatacaacactaaagtgtgggactagaagtgctttagtacaaagcgcagagggctgtggcgaagtctggtgacatcatggatggacagacagtgggttcctagatgacgtcacatggggggattggaatattgccatgcgccttggctgcgggcttctcacttgtatttatatttgtttctaaggtttttctagtgctgtgtgacctaagaatagggccattcctttatcacctcacaattgctggaccacagagaaagacagctttgacaaatatgaatgtcccagaggcacatgcccctcccctagcctctgctatgtctcctggccacaaaccccctgttgtaattcttcagggtgttttattctgaagcagtgctcattctttctgagatgaacatagagcaagtctggctgtgagcaggggtcacctgtgctgactgtgtgccattcatgtgacagctggagcccagctcaggccggtagcacagtaaagggtttgttatttcggtatccagttcccaggtatgagggaactctcaaagcctttgcctgtccccacagcttgacttcctcctccccacactccctgccagccttcagagaggccaggtggcatctgcatatttgaaactctcaggcctgtggatgtcaccggcacacacagcatcctgcagaccatgggtgccttctgttcagaaagcaggtggagagtggctaggggagggaagtggacatgagaaggatgtcacattgaggaagcctgttcgcagaaggctggaggtgcccgtacccaggagcgtctcagacagtccaaaggcagagtaacgtagactctggacatctgcagcactcatcctttgaagttacttctctctgctcagactcggcccctccgcatcttttcacatggctcttgggagatcatcactcacaccagcaagatagcttttgaaccacagtggaagtgcagtagcccagggaagccactgtgtgaaagcagctctgctgtccggagcaggacaagagtatactcatgaccacttgacttcaaagccagaggcccatggctgtcagagttcactggagagccaggaaggtgccatactgtaggggactgcagggagccagggagtgactactggaacacagtggggaggagcagcagaggcctggggaggagccagggagtgactactggaacacagtggggaggagccagggagtgactactggaacacagtggggaggagccagggagtgactactggaacagtggggaggagccagggaatgactactggaacagtggggaggagccagggaatgactactggaacacagtggggaggagccagggaatgactactggaacacagtggggaggagccagggaatgactactggaacacagtggggaggagccagggaatgactactggaacacagtggggaggagcagcagaggcctgaacatgtcagagatggaggcagcatagcagatgggggtggccaattcaaagtgcatccatgagtagcaagtgtggaacagtagcccaaggatacctaacagatgacactgtacaccctgatacgtcctagacatcacattaaatatctgtattgtatacatgcagctcattatccagcagtcagacctcaagaaaactgcttagaagggaatggcctccagcttgcaaagatgtcaacccctccccaggaaatacaaaaacttttcttgtttattttatgagccattgagtggctagaagtgataaggacaaagaacaaatgaagtgatgtctttgcaggaacatcggtgagaaaggctggagtttttcagccagggctgccacccatccccaactcagccagtcagatgagcccaagctagggagagctccttccacttacccctcccctgtgcccgttgctgagtggagtccaggtcagtgcagagagccaaggggctctgcctccccagctgggatacagtggtcattctaaatgtctattaccctgctgcttagtaaagcagtgtaggacctcaggctcggtctcccctgtattgccctcccatctactctagaatcactctggttccaaaacaggcctgcagataagtagctagtgatctgcttcccaggcactggctctctacatataacctacatacaacctaaggcagaagtcaacccaagggtgttcccagtgacaaggtgcggccaaaagggagaaccactaggctgagaaagtcagcacaagcctcccaatacagaaaatggactttaccaaaatcatcactcatatagctcaatcctcagagatcctccaggtcgcaggaggcaaacggtgttcatgataataaggtccagtgcagtcaaaagatggtgctttgtggggcttgaggcaggctctaaatatgtgaatcgttcatctgcctattactggtatgtgaggttgctgtgtaacagggccctttatgtcttccacttcttattgcaagcctaacttagagcactgggctcccttcagactcttaaggcaacagaagagcacgaacagggcctggccagctcgcttagctccacagcttcctgacacttcccagcactgatggagagccacggctgagtttttagaggaagagtccaaacttcatttgccttagagtatgagttcccttcctctccctgggtgcccataccaaggggccctgctttgtttgaggggctgatggtttcctcacaaagggtaccaaaaggtctgctcatttacttttatagtaggattctatattatttggtcaaaatattactttaaaattggcaagctgatggtatctactctgtcctcaggcagaaataatctcagaaattgacttaggcttgctgtgttttaccaaagtttgtttttactgagtgctacaccagaatttattctcaggggcacagctgctaagttgtaagtcttgaaccaggcattcatattaacataatttgctgtcagagacgagaagcactttgggtggaccgtttgatttcattactggatgttaacctgagactgtctttaaatgtctcctgctcactgggtgggctctgggatcccctgtataacatacagggaacttcctcttctgacatgatactgggaacaactgtgatttttacatttacctcttttaacctgtcagctaacctgactggataactttgttaaagcagatcggagacataaaaacagctgaaaaatattttcaagacgttgagaaagtaactcagaagttggatggactgcagggtaaaataatggtcctaatgaacaggtaaatatcttctacttacttactggggtgtgtgtgtgtgtgtgtgtgtgtgtgtgtgtgtgtgtgtgtgtgcatatacacatgcatgctgagctcagaggcccactgtggggagttggctccgacacgcatgaaccccagcagctttgtgggactggggttccaaggacagcgggagactcaacctgctgagccatctcattggcccacaattagtctgacgtcctgtcctcagaactctcaggccaggtagcatgctgttcttctagaatcagaacataagcttgttttcagtatagccttacagcagtgtgtcaccctgccatcagctttcctgagtcccatatgcccagctcatgctccctgctctgaccacagcagaaagtgaacatggtcagtttataagccaggagtagccttggttggagctactgcatctggactagaccctggatggcagacttgccagtgagtctgacaattcagtcagcattgaaggaagccactgcctccatcgtccattggagagcacacgacccactctggtatacgtgcctgatgtgtccatggtacatggtgaaacttacccttggctctcctgtgctcactgccttctctgttgtgtgcattccagagcctttctgtaccttggccagaataacttcgcagaagctcacaagttcttcacagagattttgagaatggacccaacaaatgcagtggtaagacatgcagactaggtaccccacgggcccctctaccttttgctgaccagtaatcccagactcctgctctggcctggcctggcctgggctggcctttaaagaagtccacaaagggtctggtgagacatggggaccagggaccaccaagacagacgggcttgtgtgtgcgccaccctgagcacgtgttctttgctccaggccaacaacaatgctgctgtgtgtctgctttacctgggaaagctcaaggactccctgcggcagctggaggccatggtgcagcaggaccccaggcactacctgcacgagagcgtgctcttcaacctgaccaccatgtacgagctggagtcctcaaggagcatgcaaaagaagcagagcctacttgaggccgttgctagcaaagaaggggacagcttcaacacacagtgcctgaagctggcttagttccctccaggtctctgtacctgcagacacttgagcagatgggtcagtaaaagcatttgatgggtgtgcaggagcatgccttcggctggctgggctaccctcagacccgctgacctgcctaccatgtagttgcacaatactgcctgttggtgaaggtgagccatatgcatggcattcagaaacagggaacataaggacgtggggttcccttggtttgttcatggaagctaacttgttctttggtcacttctgaatactcgtttggtaaataatactgcctgttctcactataggcctaaacaatcacagttcattgtcttcctccctccatatcccaaacaaaagcattgctttgattattcagctcactcagaacacagctgggcaaggagcatcatgggctggcacagcatctatgcgctcctgtgcctgaaggcaagagaattgcttaacgcttgtatgcgctttttccactttgcaaaatgtaaaggacctggaaatggtcttccgttcccagctttcctaattcatgtgaaaacactcattttaaaggcaggatgcacggctgtgggatgcagcggagcatcatttgtgcctcacgatctgagggcatgggttccaccccagctccataagcaaaactgctggctcttcatgtctataataaagtgaaaagtgcttgtgttatttcctgaggagacatgagcaaatacgtcagaagtggcacagatgacagaccaaatggtctaactcgagacttaacttagagaagcagtgagtttagggggctcactcacaggagcatggatactcagagatgctgaaaaggtcacccctccttggtggggactgtcaaaagctgaatctgtggagcccctgcagaacttaagtcagctcagctggccagcatcctgttccagctgttgttactgctgtgtaaccttgaggagaggtctcatgaacatagcaagttacatgagacctgttcttccagggagctgtagttcacttcagaggaagaggccacactgcgctccacccctttatcacctccaattctttccacactggcttccttggtgtctcctgagctttacaagggctctgtagacgttggtttatgattgacattgtcccactgtacctcagcaacagtcactcgcaggagcttgactggcgggtgtcatcagtcatctttggagtaaacacattgcagaggccagttgtacaggcagcacatctgctttaaccctagagtagcgtccaccccagccacaggctgcccgcctgccctgcttttcagttccaaactgagttccctccaggggagcacacttagaatccactcagaagccagaagaaagcgctggagctccgggtggctgggagcagcatgatccagattctgggaaccaaactctggtcctcttcaagatcagcaagcagtcttacccctgagccacctcttctggtctgtgtactgcatgttcttaaggctaggactaggaatgtggcatgtgggaaaggcggggccaagtgcactgtcactgccaccaagggcagaagacagttgttcacagtcttacagaacagaaaccaggcctaaggggctgaggcagaacaccttgcctgttttgagccagggatgtgagagctaagccacaagggtcctcggctctggccattccagcagattcatcctggtcccctcgggcaccacatcaacagatggcatgccaggagccactggatgtccaggcagcagaaacagtatcctaaggtatggtctcacatctgcaggtaaggtcaacccagtgatcacccagcccacattcccatggtcttagtattctgttgctgtgaagaggcaccatgaccacagcaacacttataaacattaattggtttcagaggtttagtcattatcattgagggaaacatgatagcatacaggcagacatggtgctagagacggagctgagaagatcaagccactgggcctggcttgagcttttgaaacctcaaagctccccaccccccatgacacatttactccatggccacacctcctaatcctcaaatagtgcctcttcctggtcactgagcattccgatctgagccgactcatccgcccagtgagaggcaagggccagagaggaaaagaggctgctcttgcggtcctgaaagcatggccgttctatggattagctttgagcctctgtgttagagctacccacagaagacatcacaaactagacccccccccccaaaaaaaaaaatcagggcagatgctggtatacatgtcactcttaggatcagggcagctagctgggtgtggtggcacatgcctttaatcccagcacttgggaggcagaggcaggcagatttctgagtttgaggccagcctggtctacaaagtgagttccaggacagccagggctacacagagaaaccctgtcttgaaaaaaaaaaagagagagagagagagagagaaaaagatcggggcagctaaaataaatgcagactccctcacacagggaagcccagttatcctggcaacaacccaagctatcatcactctggcaccagaagtgataggctatttttcaaggttcactatgctaatttttgaacagccattattcttctaatccgtcataataaactgccacactccctcaggagcaatccccttttcttgtttttctcctcctagagagttaatgcctgcaggtcttggacccatttgaacaccaccacctctgcgaaaccctgtccaatcacactggtgaagagtaacaggccacacagtaagcccagcccttcatatggaacccaccactaggaagcccactgggagggaacatccagtctggagctcacccaggcctgggtttagcagagccaataccaacacttccatgtgccacacagcatccttgcttcatgttgtttggtacctaagctacaggatgtgcagacaggtcaaagttcatactggcctatggacactcatctagcataaaaacagcacacatgaaaagggaagcctgcgtgacttctgtttctattgctgtgataaacatcacaatcttttgggaaggtaagatttttatttcatctccagggttgcaatctatcatggagggaaatcagggcagaaaccttgggacagtaaactgaagcagaacccacaaaggaacactggtgtactgacttgctcagcctgttttcttacccccacccacagtgagctgagccctcccatgtcaatcgttacattaatcaagaaaatgccctacagacttgcctatgagccaaccttagaaaatcattttctcaattaagagtccctcttcccaggaaagcctgtgtctgtcaagttgacacgaaccaaccagcatagtgacaaagaacacattccctgcactgagcatggccatttattttgttgtttgagacagttcttccctacgtagggaaccagacacacatggaacactgggttctcctgcctccacctccagagtgctgggattccatgtctgtgttaccacaccctgcttggaccacttcttaactggtcctgtccctccccagcactctgtcagacccggccttctctctccctgaactccccagattctaccttgaggggagagccaggcccctactgcagagcaaacggaagcctgcacagtctgcttccaccaagacctgttccctccctaccatcccagccacaggggccatcagccctggtctttccccagagccttggtctgctggactttccatcgttagaactaaatatccacaatatgcatacaactaaagtccttgttgctcagggtgactggatttggagatggggcagagctaattagaattaagtaagaccctgtataaggctgaagcactggcatactctggaggacacagtagcacagttgtcaggtgaccccaggaggcccaaccctatgatggaaatgttgatctctttttaaaaaattttttttattatacataagtacactgtagctgccttcagacacaccagaaaagggcatcagatctcattgcagatggttgtgagccaccatgtagttgctggggtttgaactcaggaccttcagaagagcagtcagtgctcttaccggctgagccatatcttcagccccggaaatgttgatctcaagttcaagatagccatcctccagtctcatatgagtctcccagtccgtggtgtttcttttgacaacccgagactcctgactctgcagaggagctgcctcacttctggtgtgtcagcagcatataatccactgagaaccagctgcacccactcactagtgttcctggctctgctctcccaaaaattttgtcctattgcccatccttgttcctatgtggaacctggctgcgaggatcttaccattcacagccctgggagctcgtgagtgtccatctcaggcatgaatgaatctgcaatgcctctcctcagcaaggtcacagtaagcatggagtggagaagccaacacagccactagtatcactgtcctagatgatgtccctgtgtggtctaaagtcctgctctgggggagggacggggtagaagacaagcctctgaaagcatctctgtccctggccctgcgggcacccctgtgctcttggatgacaagcctcctttgttctcctggagaagcaataatcaattatgccagggcgcctgagagccatcaggattaatgaacgactggccaggctgaaagatgtatagacagcaaggccaatcgctgattgcatcgatctgtctgccagacaggtgtgtggactttggacaggagagctttctgtaacagctgacacagacaagcacatttaacccattgaagcataatgacaagggacagcagtaagttgggcatatagctcagaggcaggttacattcctagaatgttcaaggctatgggttcagtctccatgctggaaactatcaatgatcattaattccctagtgtagctagagcccatgtgattaaatcactcagcaataccactaactagagatcctccatacatgagactcttggcatagagcatatcccagacttaatggctgatgggaagagctggatttattggctgtgaccaacaacagggttgtattgctacaggtaagctggtacctacagatgggtttcccttcagggatggcacagacctagacctctagcggacagctgtgcagactgcccttgacctcactgacccataaagatttcagggcatccagtgtcatccacgtgtcagtgatcaagagcctccagctcacactctgcttaccatcaaagcagcaaggccacagtgtcacaccacctacccacagctacagtcagaacgggaaacctacctcaaaaagagctctgagctgagataccaatagctcaggctctcctcagaggggagagactaaacaaatcccatagcgttaatgttttatttcttgttgcttggggagtttagggaatcacattctaaaataaatacccaatcctgcgcctcactgaaagatttcagagctcctgagcagccacagccaaaagcattaggattacatcagtactgtatgaccatcttcaggatgctggggtgtgtgtatgtgtattgtataagccataaaattatttgaggtttttgaaaacttttacatagtgtactttccaaaggaaaacagttttcagaaaaatgattgttccagctcacacatatgaacagnnnnnnnnnnnnnnnnnnnnccatcttcctattcaccaactccatccacccacccactcatcaatacaacccatcttcctaccctcccactcatcaatccagtatatccatctatccacccaccaccatccagccactcccacatccacccacccacctacccctttatatgcccacctactcctgtgccccccccaacattcttcacctacttattcacaattctacctctggaaaatgctcaaaatcctcacagtggcaaattaaggaaaattcctgtcatgaaaccccctactttccacgtccaccacgtgagacttacacttttatcccattgtgtgatcagcccagcaccaacccacccgaggccccaggacaccatgcagagtcttggatctttgtagctcctccagcccagcataagcaaaaggctccacttcagatgccaaagctctattaaggaagtaaggagcctaatgggttctaccccagcaccaaacctgagagagcaagagaaaagcatgtgtctgaagctgtgagcctcactgtataatttgggaacacacacccaccattataaatggctttcctcctccagacttggatgtagtctgtacaaattgggccagaggccatttaatcagaagtggggtttaaagatgcaatgctaagacttcatcctcccaagcctacacatcctcattggttctgatgacctacccaactgccttgtttactatcccagagcggtagactgcctgcattccagctactcaagagacaagaggcagaggagtcacacaagcccaggactcccagacttacttttaaaaacttactctagagtccagtgtggaggctcttgcctataatcctagtattcagaaggcagaggcaggagatcctttgcacttgaagctagcctggcctacattctaggccagccagagctatgtattgagacccaacagcaaaaagataacaggggctcccatcaaacctaatgacctaacttcaatcactcagactctcggtaagcaggaatcaactccctcaagttgtcctctgccttccacttgtgtaccatgggacacatacacacacacacacacacacacacagtctcagaaaaacaaaaaggacgaatattctgggaaagctaagaaactgtgacctcacttaggtatattgacagagttctgttactgtcattggtagtttgaataggtttggcccccatagactcatgtgtttgcttggcccacagggaatggcactgacactattagggaggtgtggccttgttggaggaagtgtgtcactataggagggcgggcttcagagtcttatgctcaagcttcgcccagtgtggaagagcagtctgctcttggctgcctttggatcaagatgtagaacgttgcctcctctagccccacatctgcctggatgctgctatgcttctcaccgtgatgacaatgaacctctgaaactgtaagtcagtcccaattaaatattttctaagacttgccttggtcacagtgtctcttcatagcaatggaaaccctaagacaacttcctcggtctttcctcaatctgtgaggtcatggctcacacccaagacctgtcagcatgtagtacacgctggacagcacagtcagccttcaacgggaacaaggccattcacagtggacagttagaacaggagccgaaaagaataaaaacaaagcaagcagtggtaaacatctgtaaacacaactcaggaggcaacggcaggaggaagccaagcccagtccgcctggagatagaaaactggaacaggggctagtgctgaagcttggttggtgcagagcttgcccaggactgggttccatccccaacgctgtacaaaccacgtctagcggctgatacctgcaataccagcactcaggaaggacaatatagattaggacttgacgaccatcctaccttctcagtcatcctcaatttaatggtgactttgagaccaaccggagggacaagaaactctatcacaaacaataaaatgtggctggagagacggctcttgctgctcttgcagaggacacttaagggcttggctctgtctgacctcagtgttaagttcaaatcccaacttccatatgacagctgacagtcatctgtaacataattccagtccagggtatctgacaccctcttctgacttctggtggggacacatacacatagtgcacatacatacatgtaggcaaagcacccaaacacaaaatgaactttctaaaaaaaattaaacccaggcacggtgtcacatatctcagccctcaggagaagaagcaggaggatctctgaattcaaggccagcctggtttacactcaggaggcaaaggctggggagttcaataccagcctgatctgcatatcaagttccaggccagccactgctacagagtaagagagtcttaaaaaataatcaaccataaatactaggttgacagccaggctctgggggcgcatgcctttaatcccagcactcgggaggcagaggcaggcagatttctgaattcgaagccagcctggtctacaaagtgagttccaggacagccagggctatacaaagaaaccctgtctcggaaaaaaaaacaaaaaacaaacaaacaaacaaacaaaatgctaggttgacaaaagctagtaaggattggcccttactgacagtaattcagagggagagactcaggatgtgctacctgtacacgtttgagttctaaggctgaggcgacgtcagtcacctcccatgggtcaagctgcccctcctgtgtccctaaactgtcacggagatcacggtcatttacattgagtggccactcagagaatgcctacagccatcttctccagcatagatcattggggttctctgtaactaacatactacacatagacatatttcaggattcttgttctttttctacatctacactatgtaacccaaggtgctggagtagaaaaagaaaaaaaaattttttttttttttggtttttcgagacagggtttctctgtgtagtcctggctgtcctggaactcactttgtagaccaggctggcctcgaactcagaaatctgcctgcctctgcctcccaagtgctgggattaaaggcatgcgccaccaccgcctggccaaatactcaccaagaaaaatcttatatcttcctttgaatcttgattgtaaaaggacccaaaaccacactgataatatctacccttgaaagacccccaaagggagaccctcactcatatctcgggataatagcggacccccaagaactctcgagagaccaagcttgatgcaaaccacacgaggctttattggggaaagccagagctctgggaatgactcatatcccacgcaggggtagaggagttgaccccgaggagaaaggggtcccagtttttataggccctcaggggggaaaggagaaggaaggagtaggggatttccagatctaaacaatatctattctaaaatgatttctcaagaaatgggtatgggaggggtacaaggaaagagtctggtgcaggtgtagcaactccggattggctcggnnnnnnnnnnnnnnnnnnnnnnnnnnnnnnnnnnnnnnnnnnnnnnnnnnnnnnnnnnnnnnnnnnnnnnnnnnnnnnnnncacctggcaatgggcttcttcagtgggcacacacatgggttcaaggaacggtcaaaacattggcagacacacgggttcaaggagcggccagagcattgtgcacctctatttttctaaatcagtgaagctagttctgttaacaatgaaatctattttgccaatttcagggcttctgtaacctttaacattctgtcaggatctttcaccctgatatagaaactatgtacatataaaaatcacataaggaatctaaatgggaggttttaatgaaccaagtaaaatactgtaggtacacatgaatgtacatacagctaagctgtgagcatacaattaaggtaacttagttttaagaaagaacaacaaccccacttccccaatcaacaatcagcaaaggaggaaaacgtcatctggttagttgtgctggttataactgccctcttgcaggaggcatagcttcacaccaacagacacctaaagatctgggagatgaagattggccatgcatgaatgcacataccaatccagggctcctatacctctaagtcttgacagttagggaaaattaaggtcactttttcacatttttgtggcttccatgtaaaaatcacttttagagatgctttcatttaaagacactgatctcacaatcttagcaaagagagctagtctagcctcaagttcatatagaaaagcagaaaagtgagcaactttccattcggttaccacagcaggagattcacacagtgcagttttctctttgaggagcactgctatgctgttccttccaaaaaactcatgtactgtacacgggcatcaaaatggtcagctggccggttgtatggtgtccacacaggttctccaacaaacagccgcatggccttcacgtaattctagaaaacaagccccacatctcattgaacacttccactcatctatatgggaacccttgcagctacctcacctacttagggttgagctctgtctgacctcagtgtgagtgaccactgctaggcagcataagcatctgcagttcctgcttagggtccacactggagcagaaatgagtctggactccacccaccctcctacagtgccctagagaccagctccaggccctgctgcagggttggtaagaaaataacttgtcagcacttgtctaaacaggaaatgcagtctccatgaagcccttaccttcatcctgcaaataagcatacccaggtaaaaatgacaat

SEQ ID NO: 288 - DNA, 3360 bp, Mus musculus
acgcacaagcgcgggggaccttggatcttgagtttacttccggtcttccgtcatctcttcggacccttttcgcctgtgggtgacccgacctcaggggcgggtggcaggtgaggagcgggtcgcagtgaggagggtcgccggtaccctcgaccttcccacagagggcggcgtcctcgcgtaatcaaccgctctcggccacgcagagagtagccccacgaggggctggctccttcgggctttagccaattctgtgtgctccctgtggttttggacaagacaacatggaaacagctaaagatggtgagcagagcccaagtgaggcatctccttcagcccaggcaggtcctgaaaacatcccggagcctatgtctcgggaggaggagagccagccattgtaccatgaagagaccattgatcttggtggagatgagtttgcatctgaagagaacgagcccacatcggaagggtctcacaacttcggagataagcttaatgagcacatgatggaaagtgtgctcatctccgactctcctaacaacagcgagggggacgttggcgacctcggctgtctacaggatgttggggagccccccagaggtgccactgatcaccgactgcccagtagcacagacaaagaagtggtggacactctgagtaatggcagtgaaaccgatggagacgacactcccagagacatctcagacatgacacctgatagcagagcctctctgaaggaagactcaacacaggaagatgtgacgagcatgcctgcactggagaatgctgccacggaggaagtcgggcctaaggacagcctcgcgccccgagaagagcagacctcagaagtgtcctccaatcagtcctcctccaaagacgagcccttgcccgtctgcaccatcttcagccaggctaccgccactccctcccagccacacctgtttctacaggatggcttcgagtcccagatggtgaaatcacccagtttcagtagcaccagtgagatgtcagccaagacccctcctccgatggtccagcccagtcccagcctcagtacattttttggagatacaatgagctctaattccttggcctctgacttctttgattccttcacaacttctactttcatttcagtcagtaatcccaatgcaggttccccagttccagaaaagctgtcttcactcactgcccctgtaggagagaagtccccggattccaccagcccatcttactccacaaggatggatagatcggaatcaggtgtttctcgggcccctctggatgtccctgaatctccaaagccattttcacagatccaggctgtgtttgctggaagtgatgaccccttcgccacagccctgagcatgagcgagatggaccggaggaatgacgcatggcttcccagtcaggcgaccagagaagtcctgatgtcagtagcaacccagcagtatggcactgtgttcatagacaaggagaacctcactatgcctggcctcaagtttgacaacattcagggagatgcagttaaagacttgatgcttcgcttcctgggtgagaaggctgcagcaaagagacaggtcttaaatgccagctcagtggagcagtcctttgtggggctgaagcagctcattagctgcaggaactggagggcagcagtcgacctgtgtggacgcctgctcacagcccacggacaaggctatggcaagaatgggctgcccaccagccacaccacagactccttgcagctctggtttgtgaggttggcgctgctggtgaagttgggccttttccagaatgctgagatggagtttgaaccctttggaaatctggatcaaccagacctatactatgaatactacccacacgtgtacccaggacgcaggggctctatggtccccttttcgatgcgtattttgcatgcagaactgcagcagtatctggggaacccacaggagtccctggaccgattacacagggtcaagaccgtctgcagcaagatcttggccaacttggagcaaggcttagctgaagatggtggtctgagcagcgtcacccaggaaagcaggcaagcctctgttcagctgtggaggtctcgtctgggccgtgtgctgtactccatggcaaactgtctgctcctgatgaaggactatgtgctggctgtggacgcctacctcacagtaatcaagtactacccggagcaggagccacagctgctgagtggaatcggccgcattctcctccagatcggagacataaaaacagctgaaaaatattttcaagacgttgagaaagtaactcagaagttggatggactgcagggtaaaataatggtcctaatgaacagagcctttctgtaccttggccagaataacttcgcagaagctcacaagttcttcacagagattttgagaatggacccaacaaatgcagtggccaacaacaatgctgctgtgtgtctgctttacctgggaaagctcaaggactccctgcggcagctggaggccatggtgcagcaggaccccaggcactacctgcacgagagcgtgctcttcaacctgaccaccatgtacgagctggagtcctcaaggagcatgcaaaagaagcagagcctacttgaggccgttgctagcaaagaaggggacagcttcaacacacagtgcctgaagctggcttagttccctccaggtctctgtacctgcagacacttgagcagatgggtcagtaaaagcatttgatgggtgtgcaggagcatgccttcggctggctgggctaccctcagacccgctgacctgcctaccatgtagttgcacaatactgcctgttggtgaaggtgagccatatgcatggcattcagaaacagggaacataaggacgtggggttcccttggtttgttcatggaagctaacttgttctttggtcacttctgaatactcgtttggtaaataatactgcctgttctcactataggcctaaacaatcacagttcattgtcttcctccctccatatcccaaacaaaagcattgctttgattattcagctcactcagaacacagctgggcaaggagcatcatgggctggcacagcatctatgcgctcctgtgcctgaaggcaagagaattgcttaacgcttgtatgcgctttttccactttgcaaaatgtaaaggacctggaaatggtcttccgttcccagctttcctaattcatgtgaaaacactcattttaaaggcaggatgcacggctgtgggatgcagcggagcatcatttgtgcctcacgatctgagggcatgggttccaccccagctccataagcaaaactgctggctcttcatgtctataataaagtgaaaagtgcttgtgt

SEQ ID NO: 289 - protein, 804 aa, Mus musculus
PILCAPCGFGQDNMAKDGEQSPSEDSAQAGPENIPEPMSREEESQPLYHEETIDLGGDEFASEENEPTSEGSHNFGDKLNEHMMESVLISDSPNNSEGDVGDLGCLQDVGEPPRGATDHRLPSSTDKEVVDTLSNGSETDGDDTPRDISDMTPDSRASLKEDSTQEDVTSMPALENAATEEVGPKDSLAPREEQTSEVSSNQSSSKDEPLPVCTIFSQATATPSQPHLFLQDGFESQMVKSPSFSSTSEMSAKTPPPMVQPSPSLSTFFGDTMSSNSLASDFFDSFTTSTFISVSNPNAGSPVPEKLSSLTAPVGEKSPDSTSPSYSTRMDRSESGVSRAPLDVPESPKPFSQIQAVFAGSDDPFATALSMSEMDRRNDAWLPSQATREVLMSVATQQYGTVFIDKENLTMPGLKFDNIQGDAVKDLMLRFLGEKAAAKRQVLNASSVEQSFVGLKQLISCRNWRAAVDLCGRLLTAHGQGYGKNGLPTSHTTDSLQLWFVRLALLVKLGLFQNAEMEFEPFGNLDQPDLYYEYYPHVYPGRRGSMVPFSMRILHAELQQYLGNPQESLDRLHRVKTVCSKILANLEQGLAEDGGLSSVTQESRQASVQLWRSRLGRVKMANCLLLMKDYVLAVDAYLTVIKYYPEQEPQLLSGIGRILLQIGDIKTAEKYFQDVEKVTQKLDGLQGKIMVLMNRAFLYLGQNNFAEAHKFFTEILRMDPTNAVANNNAAVCLLYLGKLKDSLRQLEAMVQQDPRHYLHESVLFNLTTMYELESSRSMQKKQSLLEAVASKEGDSFNTQCLKLA

SEQ ID NO: 290 - DNA, 121062 bp, Homo sapiens
  misc_feature (1)...(121062): n = A,T,C or G
tcagggagttccctttcctggtcaaggaaaggggtgacagacaacacctggaaaattgagccactcccacccaaatactgcgcttttccgacgggcttaggaaacagcgcaccaggagattatatcccacacctggctcggagggtcctatgcccacggagtctcgctgattgctagcacagcagtctgagatcaaactgcaaggtggcagcgaggctgggggaggggcgcccgccattgcccaggattgcttaggtaaacaaagcagccgggaagctcgaactgggtggagcgcaccacagctcaaggaggcctgcctgcctctgtaggctccacctctgggggcagggcacagacaaacaaaaagacagcagtaacctctgcagacttaaatgtccctgtctgacagctttgaagagagcagtggttctcccagcacgcagctggagatctgagaacgggcagactgcctcctcaagtgggtccttgacccctgacccccgagcagcctaactgggaggcaccccccccgtaggggcagactgacacctcacacggccgggtannnnnnnnnnnnnnnnnnnnnnnnnnnnnnnnnnnnnnnnnnnnnnnnnnnnnnnnnnnnnnnnnnnnnnnnnnnnnnnnnnnnnnnnnnnnnnnnnnnnnnnnnnnnnnnnnnnnnnnnnnnnnnnnnnnnnnnnnnnnnnnnnnnnnnnnnnnnnnnnnnnnnnnnnnnnnnnnnnnnnnnnnnnnnnnnnnnnnnnnnnnnnnnnnnnnnnnnnnnnnnnnnnnnnnnnnnnnnnnnnnnnnnnnnnnnnnnnnnnnnnnnnnnnnnnnnnnnnnnnnnnnnnnnnnnnnnnnnnnnnnnnnnnnnnnnnnnnnnnnnnnnnnnnnnnnnnnnnnnnnnnnnnnnnnnnnnnnnnnnnnnnnnnnnnnnnnnnnnnnnnnnnnnnnnnnnnnnnnnnnnnnnnnnnnnnnnnnnnnnnnnnnnnnnnnnnnnnnnnnnnnnnnnnnnnnnnnnnnnnnnnnnnnnnnnnnnnnnnnnnnnnnnnnnnnnnnnnnnnnnnnnnnnnnnnnnnnnnnnnnnnnnnnnnnnnnnnnnnnnnnnnnnnnnnnnnnnnnnnnnnnnnnnnnnnnnnnnnnnnnnnnnnnnnnnnnnnnnnnnnnnnnnnnnnnnnnnnnnnnnnnnnnnnnnnnnnnnnnnnnnnnnnnnnnnnnnnnnnnnnnnnnnnnnnnnnnnnnnnnnnnnnnnnnnnnnnnnnnnnnnnnnnnnnnnnnnnnnnnnnnnnnnnnnnnnnnnnnnnnnnnnnnnnnnnnnnnnnnnnnnnnnnnnnnnnnnnnnnnnnnnnnnnnnnnnnnnnnnnnnnnnnnnnnnnnnnnnnnnnnnnnnnnnnnnnnnnnnnnnnnnnnnnnnnnnnnnnnnnnnnnnnnnnnnnnnnnnnnnnnnnnnnnnnnnnnnnnnnnnnnnnnnnnnnnnnnnnnnnnnnnnnnnnnnnnnnnnnnnnnnnnnnnnnnnnnnnnnnnnnnnnnnnnnnnnnnnnnnnnnnnnnnnnnnnnnnnnnnnnnnnnnnnnnnnnnnnnnnnnnnnnnnnnnnnnnnnnnnnnnnnnnnnnnnnnnnnnnnnnnnnnnnnnnnnnnnnnnnnnnnnnnnnnnnnnnnnnnnnnnnnnnnnnnnnnnnnnnnnnnnnnnnnnnnnnnnnnnnnnnnnnnnnnnnnnnnnnnnnnnnnnnnnnnnnnnnnnnnnnnnnnnnnnnnnnnnnnnnnnnnnnnnnnnnnnnnnnnnnnnnnnnnnnnnnnnnnnnnnnnnnnnnnnnnnnnnnnnnnnnnnnnnnnnnnnnnnnnnnnnnnnnnnnnnnnnnnnnnnnnnnnnnnnnnnnnnnnnnnnnnnnnnnnnnnnnnnnnnnnnnnnnnnnnnnnnnnnnnnnnnnnnnnnnnnnnnnnnnnnnnnnnnnnnnnnnnnnnnnnnnnnnnnnnnnnnnnnnnnnnnnnnnnnnnnnnnnnnnnnnnnnnnnnnnnnnnnnnnnnnnnnnnnnnnnnnnnnnnnnnnnnnnnnnnnnnnnnnnnnnnnnnnnnnnnnnnnnnnnnnnnnnnnnnnnnnnnnnnnnnnnnnnnnnnnnnnnnnnnnnnnnnnnnnnnnnnnnnnnnnnnnnnnnnnnnnnnnnnnnnnnnnnnnnnnnnnnnnnnnnnnnnnnnnnnnnnnnnnnnnnnnnnnnnnnnnnnnnnnnnnnnnnnnnnnnnnnnnnnnnnnnnnnnnnnnnnnnnnnnnnnnnnnnnnnnnnnnnnnnnnnnnnnnnnnnnnnnnnnnnnnnnnnnnnnnnnnnnnnnnnnnnnnnnnnnnnnnnnnnnnnnnnnnnnnnnnnnnnnnnnnnnnnnnnnnnnnnnnnnnnnnnnnnnnnnnnnnnnnnnnnnnnnnnnnnnnnnnnnnnnnnnnnnnnnnnnnnnnnnnnnnnnnnnnnnnnnnnnnnnnnnnnnnnnnnnnnnnnnnnnnnnnnnnnnnnnnnnnnnnnnnnnnnnnnnnnnnnnnnnnnnnnnnnnnnnnnnnnnnnnnnnnnnnnnnnnnnnnnnnnnnnnnnnnnnnnnnnnnnnnnnnnnnnnnnnnnnnnnnnnnnnnnnnnnnnnnnnnnnnnnnnnnnnnnnnnnnnnnnnnnnnnnnnnnnnnnnnnnnnnnnnnnnnnnnnnnnnnnnnnnnnnnnnnnnnnnnnnnnnnnnnnnnnnnnnnnnnnnnnnnnnnnnnnnnnnnnnnnnnnnnnnnnnnnnnnnnnnnnnnnnnnnnnnnnnnnnnnnnnnnnnnnnnnnnnnnnnnnnnnnnnnnnnnnnnnnnnnnnnnnnnnnnnnnnnnnnnnnnnnnnnnnnnnnnnnnnnnnnnnnnnnnnnnnnnnnnnnnnnnnnnnnnnnnnnnnnnnnnnnnnnnnnnnnnnnnnnnnnnnnnnnnnnnnnnnnnnnnnnnnnnnnnnnnnnnnnnnnnnnnnnnnnnnnnnnnnnnnnnnnnnnnnnnnnnnnnnnnnnnnnnnnnnnnnnnnnnnnnnnnnnnnnnnnnnnnnnnnnnnnnnnnnnnnnnnnnnnnnnnnnnnnnnnnnnnnnnnnnnnnnnnnnnnnnnnnnnnnnnnnnnnnnnnnnnnnnnnnnnnnnnnnnnnnnnnnnnnnnnnnnnnnnnnnnnnnnnnnnnnnnnnnnnnnnnnnnnnnnnnnnnnnnnnnnnnnnnnnnnnnnnnnnnnnnnnnnnnnnnnnnnnnnnnnnnnnnnnnnnnnnnnnnnnnnnnnnnnnnnnnnnnnnnnnnnnnnnnnnnnnnnnnnnnnnnnnnnnnnnnnnnnnnnnnnnnnnnnnnnnnnnnnnnnnnnnnnnnnnnnnnnnnnnnnnnnnnnnnnnnnnnnnnnnnnnnnnnnnnnnnnnnnnnnnnnnnnnnnnnnnnnnnnnnnnnnnnnnnnnnnnnnnnnnnnnnnnnnnnnnnnnnnnnnnnnnnnnnnnnnnnnnnnnnnnnnnnnnnnnnnnnnnnnnnnnnnnnnnnnnnnnnnnnnnnnnnnnnnnnnnnnnnnnnnnnnnnnnnnnnnnnnnnnnnnnnnnnnnnnnnnnnnnnnnnnnnnnnnnnnnnnnnnnnnnnnnnnnnnnnnnnnnnnnnnnnnnnnnnnnnnnnnnnnnnnnnnnnnnnnnnnnnnnnnnnnnnnnnnnnnnnnnnnnnnnnnnnnnnnnnnnnnnnnnnnnnnnnnnnnnnnnnnnnnnnnnnnnnnnnnnnnnnnnnnnnnnnnnnnnnnnnnnnnnnnnnnnnnnnnnnnnnnnnnnnnnnnnnnnnnnnnnnnnnnnnnnnnnnnnnnnnnnnnnnnnnnnnnnnnnnnnnnnnnnnnnnnnnnnnnnnnnnnnnnnnnnnnnnnnnnnnnnnnnnnnnnnnnnnnnnnnnnnnnnnnnnnnnnnnnnnnnnnnnnnnnnnnnnnnnnnnnnnnnnnnnnnnnnnnnnnnnnnnnnnnnnnnnnnnnnnnnnnnnnnnnnnnnnnnnnnnnnnnnnnnnnnnnnnnnnnnnnnnnnnnnnnnnnnnnnnnnnnnnnnnnnnnnnnnnnnnnnnnnnnnnnnnnnnnnnnnnnnnnnnnnnnnnnnnnnnnnnnnnnnnnnnnnnnnnnnnnnnnnnnnnnnnnnnnnnnnnnnnnnnnnnnnnnnnnnnnnnnnnnnnnnnnnnnnnnnnnnnnnnnnnnnnnnnnnnnnnnnnnnnnnnnnnnnnnnnnnnnnnnnnnnnnnnnnnnnnnnnnnnnnnnnnnnnnnnnnnnnnnnnnnnnnnnnnnnnnnnnnnnnnnnnnnnnnnnnnnnnnnnnnnnnnnnnnnnnnnnnnnnnnnnnnnnnnnnnnnnnnnnnnnnnnnnnnnnnnnnnnnnnnnnnnnnnnnnnnnnnnnnnnnnnnnnnnnnnnnnnnnnnnnnnnnnnnnnnnnnnnnnnnnnnnnnnnnnnnnnnnnnnnnnnnnnnnnnnnnnnnnnnnnnnnnnnnnnnnnnnnnnnnnnnnnnnnnnnnnnnnnnnnnnnnnnnnnnnnnnnnnnnnnnnnnnnnnnnnnnnnnnnnnnnnnnnnnnnnnnnnnnnnnnnnnnnnnnnnnnnnnnnnnnnnnnnnnnnnnnnnnnnnnnnnnnnnnnnnnnnnnnnnnnnnnnnnnnnnnnnnnnnnnnnnnnnnnnnnnnnnnnnnnnnnnnnnnnnnnnnnnnnnnnnnnnnnnnnnnnnnnnnnnnnnnnnnnnnnnnnnnnnnnnnnnnnnnnnnnnnnnnnnnnnnnnnnnnnnnnnnnnnnnnnnnnnnnnnnnnnnnnnnnnnnnnnnnnnnnnnnnnnnnnnnnnnnnnnnnnnnnnnnnnnnnnnnnnnnnnnnnnnnnnnnnnnnnnnnnnnnnnnnnnnnnnnnnnnnnnnnnnnnnnnnnnnnnnnnnnnnnnnnnnnnnnnnnnnnnnnnnnnnnnnnnnnnnnnnnnnnnnnnnnnnnnnnnnnnnnnnnnnnnnnnnnnnnnnnnnnnnnnnnnnnnnnnnnnnnnnnnnnnnnnnnnnnnnnnnnnnnnnnnnnnnnnnnnnnnnnnnnnnnnnnnnnnnnnnnnnnnnnnnnnnnnnnnnnnnnnnnnnnnnnnnnnnnnnnnnnnnnnnnnnnnnnnnnnnnnnnnnnnnnnnnnnnnnnnnnnnnnnnnnnnnnnnnnnnnnnnnnnnnnnnnnnnnnnnnnnnnnnnnnnnnnnnnnnnnnnnnnnnnnnnnnnnnnnnnnnnnnnnnnnnnnnnnnnnnnnnnnnnnnnnnnnnnnnnnnnnnnnnnnnnnnnnnnnnnnnnnnnnnnnnnnnnnnnnnnnnnnnnnnnnnnnnnnnnnnnnnnnnnnnnnnnnnnnnnnnnnnnnnnnnnnnnnnnnnnnnnnnnnnnnnnnnnnnnnnnnnnnnnnnnnnnnnnnnnnnnnnnnnnnnnnnnnnnnnnnnnnnnnnnnnnnnnnnnnnnnnnnnnnnnnnnnnnnnnnnnnnnnnnnnnnnnnnnnnnnnnnnnnnnnnnnnnnnnnnnnnnnnnnnnnnnnnnnnnnnnnnnnnnnnnnnnnnnnnnnnnnnnnnnnnnnnnnnnnnnnnnnnnnttgtggggtggggggaggggggagggatagcattaggaagcaatacctaatgctgaatgacgagttaatgggtgcagcacaccagcctggcacatgtatacatatgtaactaactggcacattgtgcacatgtaccttaaaacttaaaatataataataatttaaaaaaaaaagagagaaaaaaaagaaaataacatttcagttaacctcaaagatacaatactgaagataaaatcctctgggttttttgagagatttcttaaggagatcaagaagttaaattaagtagcactggcagagtatgcatcttcaggtagtacaagattatagaaccttctatctacccatgtggtctctccctgtgtatccctatgtgtatctagttaaagagaaagcagtagaacttagcaggtaaggggactcgaggtcagtttgggttgaaagtctaagtaggtcagaatccaaggtctatcatttactagttaagtggccttggacaggtaactattctctctgaggctgtctcttcatccgtaaaacaggaacaataacacctaccaataatgattgctgtgagaattaaatgaaatatttgtacagtgctaagcagagtgtctgacacatagtccagagctaaatcactggtagttaagctatcagtcttgtgaatgtgatatagccactggtcaaatcctatagcacagtttattatacaggacacttaactgctgccctgtataaaatttatttgtaagaattttgtcttaggcagggtgcggtggctcatgactataatcccagcactttgggaggccaaggagggcagatcacttgagctcaggagtgtgagaccagcctgggcaacatggcgaaaccccatttctacaaaggaaaaaaaaggaattttctctcattataacaattagaacaacaattattgaacacactatgcaccaggcactgttctacgtgattcaattaagtgtattaactcatttaatttcataacagccatgaggtgggggggagggagatgcatattttattggcaaggaaaccgaggcccaaggtcacatagttaataagtgctagaggcaggatttaaaacttaggtgtctgggtggcatatgttattctactaacactgctgcctctctgactgtaacctacttaaaaacagacattggccaggtgcggtggctcacgcctgtaatcccaacactttgggaggctgaggcaggcagatcacaaggtcaggagttcaaaaccagccaggccaagatggtgaaaccccgtatctactaaaaatacaaaaattagtcgggcgtggtggcgggtgcctgtaatcccagctacttgggaggttgaggcaggagaatcacttaaacccgggaggcggaggttgcagtgagccgaggtcacgccactgcactctagcctgggcaacggagcaagactccatctcaaaaaaaaaaaaaaaagcagacatcatttatatctttaacacatactgctgcacaaaattatgtatcaagtatttcatatggcagtgaactgtgtttctatctctctatctgtccctcagtgctttaggcataacacattctcaaaagctacttgaatagatgaaaaccaggacagggctctaacaggccctacacaatcctcatcttcctcccccgctcatctcatcccctacctcattccccctgacgcatttactctatccacggcagctttcttgctgtcctgaactaccatgtgcattgcttatgctctgggggctcattcggttcatagtcatttgttgaacacctactatgtgacagtcatgaaaaggcactggaaaatacaaggtaaaaaactagtgtgaaaacagttgaatccgaagacagtctgtggtttactgaatattagtgtaccaatgttaatttctaagctgtgataaatgtacgatggttatgtaaagtgttaacattaagggaagctgggtggagggtaaagaagaactttctatgtatttttacaactcttctaaatactttaaattgtttcaaaatcaaacatttttattttaaacaacatacagttcctaccttcaggaactcaaattctagaggaaaaggtgggcgtgtaaataaatgagtccaccaaagtgagtgataacttccaggtcagaagtcatgttcgggacaggatgtgaaggggaaggaggcaggccggctgtggccaaccctgttatccagtacaaccgtttaacctcctaaagcctcagtttacttctctgcaaaatgggaactagggaacagacacgggtccttgcagggctggtgggagatctgcaaaccgaagtcaccatgggaccgcgcatgctatcaacagccaggccgagcagcacctgccgccctcccagtgacccacctggaactccagcccgtagatcactggtgcatcgtcctccatgctgcggggaagcgacccgaccccggccactcacacgctaaggacctcgctacggccggcgcgtctccacctcgcgggcgtgtatccagcgcacattcattcactccccgcagcaaacgactccaaactggaagtctttctggcccagaacagcttccgtagtggccacttcctatttttcggatgtgtcatcaatctgttcctcaccagcgaccaatggcagcggcgctggcttgtgcgcatggccacttgggctcacatccgggctctcagcgcggggactcctggaggtgagaacccggcccagaggaaataagttggtgggcggagcgggccgcggaggccggctgtgggtggaggccggctccgagcgcaggccgtcgggagcaagcggcgattagccttagctagccatcgcatctaagaatcgctcacgccgtagttgggcgccgccatgtattgtcatttgtatgtacttggcgttcctgagcgctgggccagcgcttcacacgcactgccataaggagcttcatccaaccctatgaataagctgttacacttccattttaccgatgagacgctgcaaagttgagtaacacagtcgcagcgctcattggtccattgggtagccaggatgggcacctgagctgactccctgaggttcggcccaaggtgccctaagtcagggccatgcctaatgcatttctgcaggtgcccagcactgtgtggcaaagaaagcactaccaaggatggggttatgaaagccggcaccgcaccactggtggtcctggactgcatatgcctccgaatgggagtcggaagggaaggccctggggttcctagaggtctccaaagactaaagacttgtggtggagagactgcccctctttcgcatcctgctcaaagtgcctgccctggccttgggccagcagaaatggcatcgcaaggactccaaaatacatcatagctgaaccacgccgctagcctggttccaccggggcttccaggaccacgcacctttcctccatttctgtgattagctttcccctctaccctttattgatctccgtgacggaaatggttgggtctcgttttgctcagttgggcaaggcgcgtggtattgagttaaggctggatgagtatctgttgagtggatgaaattttagagattacatgagaaatcaaatgagcaggccgggcgcggtggctcacgcttgtaaccccagcattttgggaggctgaggagggtggatcacaaggtcagttcgagacctgcctggccaacacagtgaaaccccgtctctactaaaaatacgaaaattagcccggcatggtggcacgcgcctgtaatcccagctactcgggaggctgaggcaggagaatcgcttgaacccgggaggcggaggttgcagtgaaccgagatcgcgccactgcactccagcctgggcgacagagccagagtcggtcaaaaaaaaagaaaagaaaagaaagaaatcaagtaagcaaaaacaagaaagaaagaaatcaagtaagcaatggcccagacatgagaatcatcctattcaaccactctgtttgccgatattaacttgcggagctaagagggccttcatacttcgggattaaacccacccatctatcactgatatctttatcattaattttattatacaagtactgcaggtgcatggtaagaaacttacaaaatacagataaacacaaagacaaatccatagaaacactgatttctaggatatgctggtcaataaaaatagcctaagcgactccctttcacccgccccatctgccacaggcttgcctattgcctctgagtgacagaatcaggctaggtggagtggagtctccgttcccatttccaagtacagggtccgctcccctcaactaccggctcctggttgcctgtgcgcgttcacacctagggctccaggccccgcccacagcagacgaaccggaaacgaaccccatttccggcctgggggcagggcctcgggttcctgcatcgggcctgagcagaactaggcgcgccgcggcccggcacgcgcaggcgtacagagctgcccgggggtgccagttcctctccgattcccggcttctgtcaccttcctcacggaccttggtcacggccgcaggtgaccccttagcccagctccagtgggcgggtggcaggtgaggatcagggcttcggcagtccagaggggatgggaccgtgtagcgccacctcggggagggagcacactggctttggcctcagcccggaggaaccttctctgggaccgatgctagagtgggcgtggggtccgggcgcggggtcgcctgccacccaagggcgtgtgtgctccgcgggccttgtgccaggctccacgtcgccgcggcccttgctctccacgtctgcagagggctggaagcgtctctgcagcccgcggagtttgcgggaaggggaagctgctgcgaagcgtgtgggaaactacccgctggcgcgcgcccaggcgtccccgagacccccagttccaggcttggtgccagccaggcccccagcaagccccttaacttcccttagacttaattcaccctcccgcggaaagaggttactaatgacctgccctgccaaactcagcattgtgaggctgcaatgcagtgtaaaagcatttgagtcactgtgtaaacgtccgctgttgctacacatactaattgtagagtatatttactgtgaagacggaaaaagcgtttattcaacagaaagcgttagggtcaaagatgtgttttaacgtgtcattttttcactcttcactacgaaacagtgtagccccaaggaaaaattttcttggacctacggtttgtactttttaatggctacttgaagatatggtgtctttggattcagtcactgttcgcaaattcagaagatagtggcggataatgagccagtcccgtcttgggattggggtgggagagggacaggggaaaagcaaatgaaatattacacagtgttactcattcagttcttacattttgtgatatctgatgggatcttcttcacagttactaaactgggtgttgccactctgctttatcattaaaatgataattactatgcttgtgtctgtgcagctcttcacactttaaaagatgcctatgcaggggtgccactatttaatcctctttattctgatgtaccatctaaaagatcaagattttcagaggttacttcacttggtcgggaagctaagactcaacacagttattgagacactgccttcagagctctttctgcccacccctgcctggcaaccttgcaagaggagctgagaggtgaccagcacaaagaaaagagtattggcagaaaacgctgtgtgggtagcctgtcaccatcaggtactgtcagtgtgatgttaggcaaatcacttggccttctctgctgtatgatggaggtaataataatgcttcaaaagtttaggatgagtattaaataataaggtaaaatgcttgatctgtagtgagtgttcattacatggagacttctgttaatacgtgccacctagatttccactacacaccctcgtgcccttatggaaggaaattttacatgactgcaatttggtaaaagatatgtttacagagtgtctgtgtccaggaaatgaacctgagaaaccaagttttaaatgttgttaggaactttttatttctcaaatacagaattacttaaatttaatatttaaaaaaattttaaacaattaattaatcacattcttgtgcaaagccctcaactggacaaggagaaagtcagatttctttgctgcactgtgatgtaaagcttctgtaagcttatgtaagcttaaaatcctatttatagtttaataaaaataaagccaatgataggagggagtaaagatttctatcacgtacaaatcaagaacagatacttgtgtttttccatttttaattatgaactataaagactacccgtaacacacatgtgagatttaaagatcaagtcaacccagtcttccattaccagcataagatggggaccatttcccagtgcgttgaaacttccgtgtgtccctccccagtcaagctctcctgccatcaccttccacccctccctcactaaagtggctgttactatatcctggcttttctttgtagtttgaccaaatatgtttgtgttcctaacacagaaaaagtgtttggattcaacacttttgtttaatttacatgtttttgaatatacagagtcatgctgtttatttttctactcattctttgtgcaaaattgtatttgtgagatccaaacataatttatatgttagatatggaagagttcactgattttcaccactattttaatattttatgtcctagtataccacagtctacttatttacttattattgtgtctacaggcagtgtttatttccactttttttttttttttttttttgagatggagtcttattctgccgccaggctggagtgcagtggcacgatcttggctcactgcaacctccgcctcctgggttcaagtgattctgctgcctcagcctcccaagtagctgagactacaggcgcccgccaccatgcctggctaattttttgtattttaatagagacagcatttcactatgttagccggtatggtcttgatctcctgacctcgtggtccgcctgcctcggcctcccaaagtgctaggattacagatgtgagccaccacgcccagcctactttttcttttaggactttagaagaaaggtattttgatgtgttatttatgaaattcagcatcatagcttacactgctcatgtacaggaattcctccatgataggtatctagcagtggaattgctaggtcctaggtactacgaccacatatttattgtctcaaccaagactcctttaagagtgaaaggagacacttaatgattttactgaggcgaagcacatggctcacgcctgtaatctcagcactttgggaggccaaggcaggaggatcacttgagctcagaagtttgagaccagcctggccaacatattgagtccccatctctacaaaaaatacaaaaatagctgagtgtggtggtgcacacctgtagtcccagctactccagaggctgaggcaggaggatgggcttgagcccagaagatcgaggctgcagtaagccatcatcgtcccattgcactcccgccagggtgacagagccagactatgtctcataaaataataatactaataaaataatagaaataacttaaaccatgggtgaaaaattgaattgttctgggaaaaatcaagatgtatagttatcaaagtgataagataatgtgctttttaaactttactagataataccaagtggtttctcaacatggatgttcaaaggtatacctctttcagctctgttgcttatttttctaatggatcatttagtgtgcttttattaatttgtagggattctttatgtattcttcgtgttaatcctttctcagttacatttgtttgtttcactttttttaggtttttaatgatagaactttccattttaatatagcagatgtatccattttccctttatggtttgtactgattatgcctagtttaagaggctttgcctactctgaaaatatattctcttatattttcttttgaaagttttgaagttttgcctttcacagttaatttttgatcccccacccccgccccgcccgagacggagtctttctctgtcacccaggctggaatgtcgtgcctcaatcttggctcactacaacctctgcctcctgggttcaagcgattctcctgcctcagcctcccgagtagcagagtagctgggattacaggtgcccgccaccacacctggctaatttttgtatttttagtagagacggggttttaccatgtcggccaggctcatcttgaactcctgacctcgtgatacgcccgccccggcctccgaaagtgctgggattacaggcgtgagccaccgcacccggccttcacagttaagtttttaacgtccctgagattgatactgtgtctgtggtgagacaagattccaagtttattttttcccagctgcatgatttgtctacacatcactcaaggaaaatcgtctcttcctttgatgtgtgctacatattcccttgtgatagttcagtcttgttttttttttttttttttgagatgaagtttcgctgctgttgcccaggctggagcacagtggtgcgatctcggctcactgcaacctccgcctcctgggttcaagtgattttcctgcctcagtatcccaagtagctgggattacaggcgccctccaccacacctggctaatttttgtatatttagtagagacagtgtttcaccatgttgaccaggctggtcttgaacttctgacctcaggtgatccaccctcctcggcctcccaaattgctaggattacaggcctgaaccaccgtgcctggcccaatatttcagtctttataccatagatttttgatgtattctacataaataatcatacacgaagaatgaaggtttgtatttttttcttttcagtttttattgtagcttttagttatttttcttgccttaatcctgcccgaggactccagtattaggcagcataaaaatgttgaagaggacatctttatcttttttctacttttaaagagaatgctttaaacgtttcactgttaatttgaggtttcctttaggtttttggtagatacctttgattgcattaaggaagttactttctgttgctagtttgctgacaggttttatcttgagcagatgctgaattttattagatactttcttgtgcatctattgagatagtcatgtacttttatttaatctatcgcattaaaccaacagtacatttctgggattacctgagtttggtagaaaataaatacattgctgattcagttagctaatatttcaagatttttgcatgtgtgttcatgagtgagatgatagcttcccttttagtatggccttgtcaaattttggtctcaaggttatattagccttataaagtgaattgggtcatgtgtcttttttcttctctgcaagaatttttgtactgtaggaattatctgtacggaatctttggtagaattcactggtaaaccctctggaccctatattttctttgtaggaagacttaactactggttatactttttttatggttatagaactatctcgtcatatatacatggttattactagtgtctgctttgcatttgaaccttacattggaataagattagagtaaggaaacccttgaagtgaagaagctattttgctacaaattatatgtccattctcacaaaatcttatgtatataatttatatagatgtagctttataatatatgtatgtcttcccattcataaaagcatcatctaaatcacgttttatatcatttttatttgagcattcctcttgattttctagagaagaaaccctcagatccttacttacaagcattttcctgcatctagattttatttgtgtgaaagcaaaagtgatcatccttgccctaaattattagggctttttattactttggtatttacttaagaataaaatttatttttttattttcttctcttctcaaaagtggtttgcaggtattaatgaaaattttggacattcccattttatcagttctccttaatttacaatttataaagtttttaagctttataatttagaagcattttaccttaatttttattattttggtggtttttctaggcgatgttttttgttattatatctctgataaacagatttccctaaatcttacaggtttaaagcagcttcatcttcacaatagtaagaattgtttctttaaaaagtttcttcacaaaggcaataaaacttttaaaatctgtgagattgaatcagaattagctttagaacctagaattttgttagggctgagggtagatgagacggagggaagatccctttctctcatcattagcttatatcgaaatcaattcttatttctaaaataaaatacgcagaccacgctagtgccttcaagtcctgctgggagacttcagagggggcactgcctcatgctgcctgtttgctccttgtgcccggcctctatccctgcacaggaaggacccgaaggagcagccttaccatgcacagggggctccccctttggggttctagggcaatttgttcttcgggctcccggtgaaacatggcaggaaaaaaaacgttttactccttttcattggattttttattcatttatacttaacaattattggatgaatgtataagggaattagtagctgaccaggctgaaccggaaacttcttcaaaatgtataacttggattatgtactttaaaataatgttttgggaaggctgactcattgggaatactatgatggaagtgttgacagtgagaaaagggtagtcttatctagagatcagctaagtgtcattttttaagtaaaaaaggtacgtgttgttttattctgaaaaaaatcccttatcttttatcatagtctcttagatttccttaacttgaatttgttcactatgagagtaaaactacataaagtaaaagtttttcaagaaaaagaacaaatacttttttacagtttgagctctttgtctcattctttggctggtcctggtttccccactcactagcggtgtgatttcggcttacatagcctcccaaggcctcagtgtcctcatctgcgaaacgaagacagtgatagcagctgtctcgaggggtgttctgagaatcacacaggcatatgtatatatagccaggggcatagtatgtgcggataaatgttagctagttgtgttgtcagcttcagccatcagtgcttagtgagtgtgctgttttcttactgtttaaatttttcatgtcattcgcactgtatcagatttccagagtcaggcagataatatgagctggggcgtggggcgggggtaggggcggacggcatggggaagtcaagagactattacaaattgaagagtcttgggagggcttcatggaagaggagggacttagctgactctcagaatgaagtagtgtttatatggctggaacctcacacctactggaatggctactatgaaataaaaacaaaataacaagtgttggcaaggatgtgaattccaaggcttgtgcactgttggtgggaatgacaaacggttcagccactatgaaaaacagttttttggtgcctcaaaaaaattaaaaatagaattaccatataatccagcagttccttctaggtatttacccaaaatgattgaaagcagggtctcaaagagctgtttgtacagccacgttcattgcagcagcatccacaatagctaaaagatgggagcaacccacgtgttcaacaacagatagctggataaacaaaatgtagtgtatgcataccatggaatatttttcatccataaaaaggaaggaaactctgaccaagctgtagcataaatagcccttgaggactttatactgagtaaaatcagccagtcacaggaagacagttatcgggtgattccacttattttatagtagaatggtggatgctctaggcgggggagatgggtatacgggggaatgtttaatggggatggaattttagttttgcaagataaaaagtgttctggagattggttgcacagaaatgtagatgtacttaacactactgaacttaaggtggtcaattttatgtgtattttaccataatcaaaagcacatggataagaagctggagaaatggaagtctgcgtcatttgaatctataagcaatactcatttttcggttgaggtgaatgaagatcacgctcaggggccttctctctgtctttgctttcagggtcatggaggacgctggcggcggcgaggagaccccggccccggaggccccgcacccccctcagctcgcgcctccggaggagcaggggttgctcttccaggaggaaaccatcgatcttggcggagatgagtttggatccgaagagaacgagaccgcatcggaaggctcgagtcctctcgcggacaagctgaacgaacacatgatggagagcgtcctcatctctgactcccccaacagcgagggcgacgcgggcgacctgggccgagtgcgggacgaagctgagcccggaggggaaggcgacccaggcccggagcccgcgggcaccccgagtcccagcggcgaggccgacggcgactgtgcccccgaggacgcggcacccagtagcggaggggccccgaggcaggacgcggcccgcgaggtcccaggcagcgaagctgcgcgcccggagcaggagcctcccgttgcggagccggtcccggtgtgcaccatcttcagccagcgcgcgcccccagcctccggggacggcttcgagccgcagatggtgaagtcgcccagcttcggtggcgccagcgaggcctcggccaggacaccgccccaggtcgtgcagcccagccccagcctcagcacgttcttcggagacacggccgccagccactccttggcctcggacttcttcgactccttcactacctccgccttcatttccgtcagcaatcccggcgcgggctccccggcccccgccagcccgcctcccctcgctgtgcccgggaccgaggggcgccccgaacccgtggccatgcgagggccccaggcagctgcgcccccggcgtcgccagagcctttcgcgcacatccaggcagtgtttgcagggagtgacgacccctttgccaccgccctgagcatgggcgagatggaccggaggaacgacgcctggcttcccggcgaggctacgcgtggagtcctgcgggccgtggccacccagcagcgcggcgccgtgttcgtggacaaggagaacctcaccatgccgggcctcaggttcgacaacatccaggtgagcccgggtctcccacctccgcagcccgtgcctcctctctgcgtctgtgagatacgcacagtgcccctcaagggatggagaaggagaaggccttgttttcagtaattcctaacatcccattgtgagcgcctgtgttcctctgtccctgggtaattagggatctgttggtttccccaacagaacatatttaatggactgctactcagagaggtagaaataaataccaccaaggcagacagttctaccgtaattctctcagtcagttctccatgtcctgtaatccatttgacatttgaactccagttaataataaatccatttctttctttaaaatatggaaaaatatattcctgtaacatataatgtgcccgatgtagaatttttataggttgaataagaaaaatacgcgtgacccaaaaagtaacaaatcacagaaatatataaatgttaagctaaatggtaacatacaaatgttcgatctcactactaatgaaagacaattgatgcagggtttttttcggtgccgctttgccagctggagacctccgtggtcggcgatgcccctgcccaggcctctctcggcccaggttcgcccactaggcctgccgggccgcacctggcttgcgctttggcatatcccgtggcctcggtgactgtgctctcagcccccagcaggtgggttgtgcgagcaactgagtgtaggggtccgggggctgctccaaccgccagcataggagcaggctccacacggggcttgtagctggaccaggcgtgtggcaagtgactcccacagtggactcctgcgtccaggcgaggggaacaccgtggcgcccgaagagcaacgcccgcgaccccgaagcccgagaggggatgttacagcgtgcacacagctcttttcgacccgcatctgctgccggactaacgggcatcttaacggctctaaacgggcgcattaacagaccactgcttcccgttgagtggggcagccgaagggggtgggggatggagggttacagtgttattgctgtcttggtacctgcactccgcggagtcctgagttcttgtcctgcctccaagaagaacgagattatgccgacaaccagagtgtgaggagggcggacgagttttattgagcacaaaacagctctcagcagagaggggaggcgagggtggtcccccaccgaaagtcaggtggtgtctctcccagtgtggctggctcaggggcttttttgggctcagaatggaggggtgcatgctgattgtgagtatgcaaaaaagaaggctaaaacaaagtcaccactcaaaggtgggcacgacagtggaaaaaaccagttggggaagggtaggtatatgtaaaataggtgaagaggggtaatcaatcagaggaaagtgctccacatgggacgaaaggttctcagtcccttacgtgggtttatccgggacttgcagctaggctttaaactgtcttcagttccagtcaggtttcaccggggaccgcccctgtctgcctaggatttgtctgcctcctgctgccatcacactcgagtcatttccgtttccatttatcaatcatgatctactgtttgttgaagtgtgggaaaatagcctctctaaggcagcccagatgggaccaaaatcagtacaaacatatttaagtaaattttaaaatgcgtatcaaatgtgcatattctttgacccagaaattccactcttaggaatgtattgtgaggacataatcatacttctatacatataccagctgttgagatgtctatcagggtggtttgtaattgcaaagaatctgaaataatctaaaagcccgttattaggaggcttgaatacatttgactcacctcatctttgcaatggaatatttatgtaagtttttaaaatgatgccaggggttagggggaggaagggatgaacaggtggaacatagaggattttaaggcaatgaaactattccgtgtgatactttaatgctgggtatatgttgttatttattttaccaaacccatggaaagtgctacaccaagagtctaccctaatgtaagctgtagactttgggtgacaatgatgtgtccatgtagattcatcagttgtaataggtggaccactctggcgaggtgcgttgatcatggggaagactgtgtgtgtagggggacaggcaatatatggaagatctctatacccgcttaatttcgcagcaaacctaaaagtcctctaagtaataaaatcttcctctgatcattggtgaataataatataaataaattgtaaaatctatttttaaaaagatataaaacagaatatttaatgaggttcatctcatactgttaaatttgaaaatcaggacagaagatagcatgtagcatgcatagtatgataaaatttttataaatatatgtatacatatgtatcagattaaatcatatgcatgtcagttttagtttattgcaaccaaattgtgggacaggattagtagtttccatatggcactgtacatgacggggcgccccacctcccagttactggcctcagatcctgtgcgtgtctgtcttcctgaaactgaaagaaggacctacagccccctttagtgcaaccacttacccactcctgaacccacttacccactccactctcactcctgaacacaaataggtaagccaataagccaatcgtatgactgtgactattgctattgaattgatagatggctgagacctaggagtggtgaattctccaggaaaagaaaagtgacatactagagaaatgaagccaattaattttttcagataactgaagtgtaagcctatagacatccgtattttgggtgttttacaggcagtctttccagaatgttcattgactaatttactaatattcatttactatacttattgtgtgtttactcttgaccaggcattggtctaggcatccttctctaccctcttaggcagaatatactgagcataatttaacctttgcaggatctttttaatgaataccaattccggactctgatgtcaggggtatttggatgtgtgggattggatttatttgtcactgaattcttacctgtactcccactccctggtcttgtctctgtatcctgtccccccaagatggctttcatgttctgctccatgtttcttcccttctctctcggggtctttgtcctctctgctgtaaaattcctttaacatctgtgggtctggcctttagcactttctttcaaaccctctgttgcttgccttgccgtttgcttctccctctgactgtaactcagaggaaatctgaaggttgccacaggaaagacttaacctattgcttcccaactgggtgctgcagtccaacggtcttaggtacatttggaaagggggagaggtgtttcactttggttgacaaaagggctggggtgagcatatgacatttagtgagtagggctaagagtactcagtaccttgcagcgagctcaaagctttcaaggaatggaaaacacctgttcctcaaaaaagcttaaaggtctctggtcctgtccagtttctccttttatgatgaggaaacagatccgaatgacttgtgtgttcaccagcaagcctgccatgtcccaggcatcctctctcctcctgacacaaaggaaggtgtaatgcctacccgccagcccagaccaggacagacggcctagacaagggaaggcagacctgcaaatggataatttcagtgtcctgtggctcagtagagatccaggcagagtcccatgggcgtgtttaccctagataatgcagccacaacactgcagagccagtgccagaacacaggtcctctttgccttagttctggcctctttgtcttatgttgtatttctccctaccatagaaaatgactaattgtatttctctcagaaggatctctgtttaagtcaaagaactagaaacagcactaattatcagggaaatgcaaatcaaaatcacaatgagatatcatggctgttaaccgaaaactctggagacagcaagagttggtgagggtgtggagaaagggacccttgtgcactgttggtgggaatgtaaattaatacagccattatggaaaacatggaggtgcccgaaaaagttaaaaatggagctaccatatgatctaacagtcccccattctgggtatgtatccaaaggaattgaaatcgggatctcagagagatgcctgcgctccatgctcactgcagaattatacagtagcccagatagggaatcaacctaagtgcctatcgacaggtgagaggacagagaaaatttggtatgtagtggctcacgcccataatcccaacttctcaggaggctgaggcaggaggctcacttgagccatggtgttcaaagctgcaatgagctatgatggcaccactgcactccagcatggataacagagtaagacctgtctctttttaaaaaaaaaaatgtttttaaagaaaagaaaatatacacaatggaattctatttagtccttaaaaaacaaggggaaaccttgccatttgtgactatatgcatgcacctggtggacattaggttaagtgaaataagccagacacaaaatgatgaataccacgtgatctcatttacatgtggaatctacagaagtcagactcatagaagctggggcctgggggtgtgaggggcatggggagatgttactcaaagggtacagagcttcatttatgcaagaagaaggaatgctggggatggaatgtacatttaacatggtgactatagttagtaatactgcgttgtttacttgaaatttgatgagagcagattttaagtgtcctcaccaccctcacacatacacacacacacacagtaactatgggtagtgacggttgtgttaattatttcgactttggaattcagtacacaatgtctacttataacaaatgatcatgtataccttgaatatatataatttgtatttgtcaactaaatattctaaaatttaaaaatatgccttttctatttacccacatttaaaaaaaaaaaaaagaactggaaatcaaatggcttaactttagtgttccataaagagtgagtagctcagtcttctccagggtcccagaagttgcctgatacgtagacatatccctgatcagtatgtgagcttaggaagagccttgaattagaagaattggtttcaaattgttggtttgccaataacctgtgtaacctaagggaattcattgaacatctgtggctctattttcttctctgtaaaatgaaaggttttggtaagtctgtcagttacgctgtaggttcagctgcattaacaaagaaagccaaaggtatggtggctggaataggatacatgtttatttccaggtggtagaacactttggagatatgtgggccagcactgtggattgactctaccttcctcaaccaagtccaggaagctttttcccattgctgtcttccagccatctggaagagggagaggctggagagctctgcagtattccttttatgatacgtcatctggaagacagtgtgtccactcacatcccactacctagggtttagtcacttggccacaccaagatgcaaggaaggctgaaaatagtctttaggtaggcgaccatgtgctcaggcaaaaccaaagttctgttactagaagaaggggagggccgggcatggtggctcacacctgtaatcccagcactttgggagtccgaggtgggtggatcatgaggtcaggagatcgagaccaccctggctaacacggtgaaaccccatctctactaaaaatacaaaaaacagccggacgtggtggtgcacgcctgtagtcccagctacttgcgaggctgaggcaggagaatcacgtgaacccaggaagcagaggttgcagtgagctgagattgcaccattgcattccagcctgcgcaacagagcagcactttgtctgaggttaaaaaaaaaaaggggggggagatcagagattggtggatggctgagagtctcctccagtgagtccttccagcaccaaaagtcttgaatctggaatccataattactgccagccttgagcctttgctgataactgaattcccactgctgcgtatgtaagaattatccagcttgtaagtaggttcgaaacccattttctagtaaattatgttataaatcgtaggggagtttttagaataaaccacaaagggctctctaggtggaacttattataaagagataatgttgtatattctgtctctcacacacacactcacactctatcctgttattagtaatttagcaaaataatgttgggaaagcatatttgagtacagtcttttttgtggatatattttcgtttctcttgggtaaaaacttaatagtatactttctggggcttacgataaatgtgcatttagctctataagaaatagaacagtttccaaagtgggcacagtatttcatgtttccgtcagcagcgtatgagagttccaattattttgtatccatggtatagtcaacttttttcgatttttgcatttctctgatgactgaggttatatagactacttgatacaaaggatctcatgtattaatcctttgatatgtagacggtttgtatatctttatagagcatctcttcaaacgttttctccatctttcaaacttcggatgtttgtcttattgttactgtgttttaagaattctgtaaatatcctggttggaaatgagctatcatacacaatagatgtgttgcaattttttttttttttactattctatgtcttgtttttgcaatttcttaggtgtcttttgaagggcagaaattttaattttggggtgcaggtatactagctacagattctcgcagcttttattagtttcaaaattattacttttttttttttttttttttgagacagaatcttgctctgtcgcccaggctggagtacagtttcacaatcacagctcactgcaacctccgcctcccaggtttaagtgattctcatgcctcaccctccagagtagctgggactacaggcacgcaccaccacgcccagctaatttttttttttttttcttgagacacagtctcactctgtcactcaggctggagtgcagtggcacaatctcagctcactccaacctccacctcccaggctcaagcaattcccctgcctcagcctcctgagtagctgggattataggcatgtgccacgacacccagctaatttttgtaattttagtagacacgtggttttgccatgttggtcaggctggtctcaatctcctgacatcaagtgatctgctcacctcagcttcccaaagtgctggaatgacaggagtgagccaccacgcctggctagttcttgtatttttagtagagacagggcttcaccacattggccaggctggtcttgaactcatgacctcaagtgatctgcccaccttggcctcccaaagtgctgggattacaggcatgagccaccatgcccagcctcatcttcgttattaaagtttatttttgccaaatatacaacatatttacagtatgtagaattctaggttgacaggtttttttttttttctttttagaccttgtaagatgccatcccactgtcttttgacttgcatagtttctgatgagaagtctgcagtaattcttatcctcgctcctctgtacctaattgtatatttttcctctgggtgcttttatgatttatccctggtttttcagcagtttggttctgatgtactttcacatgggatttatgtttattttgctcggcattcattggctgttttggatctgagactttatcatttttgtcaatttggggaaatttggggtcattatttcttcaggtattttctgtgttttttctctctcctacttctggaaactccaggtatacctactgcttcatattgccacagaagctactgaggatctgtttttgtgtttttattttgcagtctttctctctgtggttaagtttagaatttctactgctgtccttaagttcacttatcttttcttcagactttttagtttgcagctaatcctattcagtgacttttccatgttttttacctctggaatttttatttggttctttttcatatcatttttcttttatcattttcaagctttactttaaactcttgagaacatttataagaggcaccttaaagttgtcttctgagctgggtgtggtggcatgtgcccatagtcacagctactcaggaggctgaggcaggagaatcactggagcccaggagtgtgaggccagtctgggcaacataggcctctttaaagaaaaaaaaaggaaagaaagaaaagaaaagaaaagttcttatctgaaagttccattatctatgtaatatctgcatctatttttatgtactttttctcttagttacgggacacatgttttacatgtctagtaattttttattagaaggtggacattgtggatttcaggttgtgtgtctagctttttcatcttcctttgaaaagacttgccctttattctgacaagcaagtaacttatttacagatttagtttcatgtttgtttttagactttttagaatgactttagagcagtagcttctacttttgggtgacctttctgaagtctgtactgaattccccttctgttcagtgagagcactaaacatggcagacccacagtcagcacccttcagccctgtgtgagctctgggcttgccagctcacaggactctgtccatggcagacccacactcaacaccccacagccctgtgtgagctctgggcttgccagctcacagcacctcatcctttcctgccttcagagctgcactctctgcacatacagctgagtgtcagcagtaaactcaagggctcccacacaaaccctttctctgcttagctccctcctttctagatctctggatataagaattatccagtttgtaagtatgttccaaaaccattttctagtaaattatgttataaattgtagctgggtttttagaataaaccacaaaggattatgtaggtggaacttattatatagagataatgtatattctttctgacacatacactctcacactttctctgtctcccattgttgttaataatttagcaaaataagaatgttgggaaagcatatttgagtacagtctcaagctcatcagcccacccgccttaacctccttgatgtcccaaaccctgcttgggattctcctcctgcaatgtggtccaaaaagtgccattgggttcaagagttcaactcatgttttccttctgttgggtcacagtcctttgctgtgtctgaagacagttgttagatttcttctgagcaatgttgcagttgttcacatcaagacagtccagtcccagttaccctgaaatggacagaagcaaattactgctgctttttattcattcatcagttggtggacatttgggctgtttctaccttttggctgttgtgagtaatgctactgtgaacattcacacacaggcgtttgtgtctatgtgttctcagtgatctgggatgtatagctaggtgtggacttgctggattctgtggtaactctgttcaacattttgaggccccgccagacagttttctaaaatggctattccatgttgactccccaccaatgatgtggtgtgtgagggttccagttgctccacatccttgagtttgggtttgggttttaattgttgtggtttttttgttcaggtggtctcatttttccctggagtaagcaaacactggatcagaggatagaccctgccaggataaacaggcacctttctgcattggcgatgtggcagaaagctcagcgtgttctgtgccaggtgcaggggctgctgcctttcagcagctctaccccgtgagcatttgtgtctttgggcttcccagacagtaaggcccatacgctttcagtccactgctctggcttctgttttgtctttcaccatcaaaatcaagaagggactactgagactattcccccattgcaggaaaggcagccaggccctaaccgcctgtcagccgtgagaacagccacttgctcctccataaatgcacctgaccaggagaatggggtggcgacatcacgatgagtcccagattgtgatatattcatgtgtctccttcgtgttccctgaaccttgccctggataaagtagaccctcactgaatggcttgctggtctgaaggaatcattggttctagctggattccatcccaggtgtagtagcacagctctctagaaagccctgggggaagttccctccccctcccacctcccctgcacagtaacggctagaggagatgcagtacaagcgtctccacctccctgcgctgtcaccaccttcagttagccacacagcaagggcgaggtttgtcctaagacgcttgtcacatccttggccctctgttggtgggatatttgatagtcatgcatatgctagtatctcaggaacttgctgtggtagctaaaatattaactaacagagaattttaaggacaagagattttcacagcatggtctcattgataatgttgtggggatggaggagttgaattggccctccgtccctggcattacaatttgattttgctctttacccagctcgctgcccccctggctgagatgctctttgtctgagacgagttgcatttttgcagagctttatggggccctgtgtctgaactcttttattttgccttttaattattgctgctagatcagttagctgattttgtggatctggtatttgaagtacttcaccttatgctctgaaagcagaaattatacaactgctgcccctaggtcttttcctcaatgtgagaaaacgtgaggctggcctctgcgagcaccaggtttagcacccagggaagagacagacctatgacctggagccacccagccccttctgccgcaggctgttgatctctcccggtagaagggaggcagcagagcagagaagcaatgtcagcagcttttctgattctcttgctctcatggtctagattctgttcttcttttaagtgtcactattttgaaagatagcaaaagattgaaataaccttgcttcttaggagaaacaacttctatgcttttctttcccccgctccccccgccaccgccccgccgccaaaaaaaaagggtaggagaacaataggaagagatctgagccagcggtgaagtccaggcagggggcacgcaggcttctctgcaccctcagtcactgcgtgctcccagtggcccgcctgcagcatgagcatcagcttctctgtggctgggaggcagctttgtgctgagatggagagatcttggctttctccaccccccatcttggggttgtcctagtttgagtctctcttctgctcacccgagagactgcagggactttgtgctgtgtccctgtcagcagctgctgcgggccagacgcccagagcacggtgtcagggaagatccagccagctccggctgcttgctgtctccaggcatttcagggacctcagagccactgcttcctcctcccaggatgctcactgtctctggcatttcagggacctcagagccactgcttcctcctcccaggatactcactgtctctggcgtttcagggacctcagagccactgcttcctcctcccaggatactcactgtctctggcgtttcagggacctcagcgctgcttccctttccccctgggctgctctatccccccagctgcccctgcctcaggtgtttcagggacctcagtgctgctgccccttcccaggtgcctttcctcagtcagcagcacccccagaaaggagagagatggtccagggctgtgtcctggtcccagctgtgtgtgagaggcgtctcctgccgcccgtggagagcatcgtgtcctgtgagcagcctttacttaccctggactctccctcggcctgcggtgcagccaccgaaacagcactgaggcctgtggactgtgacagttttctctgcactgttgggatgactagtttgtccccatacaacagacttggtaacttcaggcccttccctggggcccctgaactgtgccgactcccgagggtcatgaaggctggctcgcccagcatctgggcttgacactagctgtgagattgctccctgctcagggcaggtcattggcacatctcttctgtccccaggccacacaaaagcacctgttctccctccccttgcccttctgtgtcttccctttaaagcaagtggcatgcttcagattccacgtccagtgttcttcagcaccgtctaaagatcgttctaatcagaggagtcaggtcaggagtagaaacggtcccatgcagaggcaactggattcttccctggcttgcagcatgaagtgcgcccagcagctcctggagcaaggcctggctcagcgaggctaccgaggacctgctgtgaaagggggtctcagttttcctttggcttggctggtgacctcagcactgaagagagggccattggtaatttaacttctttagccctagccctccaggctttcctggaggtccaggcaagcatggaggcattgatgagatttgggaagactattcaggcctgcctgcaccagcgcgaggctggccactgtgggtgcagcccctggtccccagcagtgtcaccttcatgctcctgggcctccctaggcccctcacctgaggcctctctgctggcttggctttgcctctcactacaagcctggtagtaggcggtaggacttaccgtttcctcttcagaataaagaacatgctttctgatcagtggtgaataaagatataatttttaaaataaaaagaataaagagcaattctaaaattatgcattttattaacgattgtgctaatttagcttctggttaattgaagttttacgatactataaccgttacttttacctccacaagccagtggagaaaaaagaaattgtgtttagttatgggttctggttagctgagtttagttgacattttattgtcttgacatatttttcttctattcttcccagggagatgcagttaaagacttgatgcttcgctttctgggtgaaaaagctgcagcaaagagacaagtcctaaatgccgactcagtggaacaatcttttgttggattgaaacagctaatcgtaagtgacaatgtgtttgatttcagtgttgttttgtgataagtcctgcctgccttcataatattttctctagaagtcaattattttgaatattattcaaagctcttgcacataagtagaattttgttggagtagatgccagtcctgtgcaccaaaaagcatcatattaatacatggatacttttaagcctaattagttaaaaagccattattggaaatgatcaaattactcaaagcagtgcatactttgattgagtttgcttcatcatatataatagagataaatgatttgtgttcattttttaaatatattgcattttctgcattttgtgtagaaagtttattattgaatgggtgaatttctgaacatttttaagctttgtcatgaattctataagtaggtttttaaaattcatggctgggcgcagtggctcacacctgtaatcccagcactttgggaggccaaggcgggcagatcacaaggtcaggagttcaagaccagcctggccaacatggtgaaccccatctctactaaaaatacaaaaattagctgggcatggtggtgcgttcctgtaatcccagatactcaggaggctgaggcaggagaatcgcttgaactgggacccgggaggtggaggttgcagtgagccgagatcacaccactgccactccagcctcggctacagagcgagactccgtctcaaaaaaataaaaataaaaaaacattagtactggatcaccattgctgtacaggttgatttgtttccaatgaatttataatcttaaagacagctgtaattgcgttgggtagcttttctagattaaggagaagatattggaagtttgtcgcgtatgtttccttcaggaatcctatggtagccatggggtaagtactctgaaatgagagccccatctcacaccgaatctcagctccccagtgttgtctccttagggggctgtggaattgctctgctagctcatccacacggttgcctagagtggacttagcaaagccatgctcccatgcctgcatgcagtcaagttagtgggcacactttcttgaaggggtttggagagtgaggtccttgattttgggaataagtcccaccggctgtctgaaactcatgttgaaatgcgcccttatcctgactgtatttcagcggcacatggtccagacactctccatttgggtgaacaatctggaggacatgtattcacctttcaactttcaaaaaagagaatggaatttcctaatttacttatttttctaatagttccccatcttgtttttctcaattgttactaattcttctgcaccgggcttcagatttcaccaatttttttttttttttttttgagatggagtttcactcttgttgcccaggctggagtgcaatggcgtgatctcagctcactgcaacctccacctcccgggttcaagtgattctcctgcctcagcttcccgagtagctgggattacaggcgtgcaccaccacacccggctaattttttgtatttttagtagagacagggtttcaccatggccaggctggtcttgaactcctgacctcaggtgatccgcctgcctcaccctcccagagtgctgggattataggcgtgagccaccgcacccgaccagatttcacctattttaagcaaactttagttcctaaagatataatagttgagaagtttagaaatttctggaggattaaactttgcagcccattgaaatgacaggtgaaggttagcctgtgaactaaaacagaaaatgagaatgttttaaagtttattttggagtagcgcgtggctcagtcccagctcagaggcaactgtcttttgtgtgaaaacagtaatatgtaaatcacttacttgcaagaagactacagtgaagttcagaagaaaataatcccagttccttttttgttacatcacctctgcctctgtatttgaaagtgaggtatagcctgtccccattctgccagaaatgactgatgtttgtgaggctgaaatcctgagccaggagaggagtgatttcttgatctttaacaggagcatttaacaaagtaacaaaattttttccttaattgactagttctcttgaattcagacaaatccttattatgtgtggtcttgtgacttctgtgacactttagaagctttcctgggttcagtatggattggggactgcctgctacgctgaccgggccacctggaacccctttgcctggggcctggctcccggctgtgatgacccagatcgcggttgtgtgagggcctttccgaagcatgggtgggggctgtactctgctgtgaggtcgcgcagggacatcgtgccctgggttcctggattttctagtccctctcttctgattttaaacttctctttgactttctactttctagtgttctattgtcagcagatctcttgcttcctaagagagcctaaaggaaaaaatatagaatcctccccattttactcaaaagtcagtttcttatattcttctcgatcttgatttttaacttcctttgatccctgatctttttcccaaaaaaatctttttttggagttttgcccaaaaagcctgtttttgagaaagtaccgaacattggcaaagcagccttagttacttggattttatcctgacttcattatatgcatgaactgggaggtgacatgtcatcagtgtcaataacaaatgctgtaacttgggggagacagagccaacctacaaaaattaaaaatctgtaataaacaccgtgacagtcaggaagcgtgtcttgttcaccagtgcatctgaggacccagcacagtcaggcacagaatgggtacacggcgtcttcttgagtaaataaagggatgagggaatgaatagataagagaacccccagtcggtaagctactcttttgataaagaagtagcgtcagaatgttgggtttaaagaaatagagaaggagctcatacaaaaggatagagtggggggcggttacgggggagggggcgcaaagagtgaggagatgaaaccacaagaagattagtctggagaaagatggaacatttcttcctctgcaatgacagaaaaggaaaggaaggatttgaaaggaatgaaaatcgaatccagcacattttcaaactgtgattctgagaaccctcgggttccagggagggaccttggggtgactgggcatggcctgcggaggtgacttggtagggccagtgtcaggcagagcatttcagcagggtctactttatgtagaagtctctcttgagatgtctttttttgggggggtggggggaaaggaggatgaattttactatttaaaaatttgaaaaactaacatagtccaaaatgcccgctttgtagattagaacactaagatctacaaaggtgtagaggttggccccaaacaaatgtccttgctcctgttaccagtaccatccctactgccccatgtcccttacacagtccgcacagcccagcaaaaagcacagttgctggtgttggttttgctcattgactacctcccaccaaatgacttagtatttctgaaccgtcggatctacacaccgtgggaattacgcttttcaatacagcttctaggactggattgtatccaggggtaggatttcccatgagaagaccttatatctgatgggattcaaacaaacaagttctcacttgtgtttcttagtgtattcattgagcaaacacatattaagcctcttctctttccagcaataacaataaaggttgctaagctagtgctcttgctccgtgaagttctgccttcttaaccatttatgggatttactcagatttagaagtgctattctattatttttaatttacttattgctgacttgaagctcatacactatttttaaaagaagtatatattccagattcacaaatttattgtaactcttatgattcttcatcagtgtcttcagacacagacacaaattcagctgcactcctaacccatggcagtgaagtttctcttttctctcctcatgccctgaatccacttcccatagggaagctgcttgtactacatcttgaataccagttcccacaaccctgcttctgtaactggcgggaatcccgagagctccagcatgaatccctcaggcctcttgccccagagcaaagttcccagctgttccctgacttgcagagactgaaggacccttccagactcagagaagccaaaccttccccagagacgcttccctctcctccttcctctgcaccacgctccccaagctgtggaactgtcactcacatggtcacgcaacatacacacacaggtctgtactcattaactcggagtaagcgcaaaaacccaggcagagaccctctcctaaaatagaagcaggaaattatcttaggtgtaggtgtttgctgtctgaatccttctggtagcctgtgaaccactggaaactatgctccccaaattgcctttcttccccacgttctttaccgtatttacagaagcgtgtcctcaaaaaggtaaacaagcatcccttgcttaccttcacacatcacaccaagtttaaatgtgagtcaatgtcagtcgaatgcttctttgagtttcttttaccaaagtgattctgtaattatttctatgattagaaagctttggagaggagagagatggagatactcttttttaaaggggaaaaaacagctaatttgtaagtatctgtatcctttataatttgctaatgcagttacggatctccagggtggccatttccctggcccatgctctgttcccaagggtgtgggcgtggccccttggtttggccatggggaagctgctgtgatgtatcctcttgaggcaggaactgaactggcagcatgacagggctttataataatgggtttaaaaatcacacacaaagccatgcatgttaattataattaattttttctacaggctattttttaccctctttgatcgttcctgttattaataaatatatacaatggtttgatgtgtttcatacgttggaaatacttgagaccatcagaaattttattaacaggcctaacaagggagcttacgtaaggtgaaaaatgtatttatgaaaggatctttaccttgccctggtattttaattctagtgtgtcctaaaataattcgtgttgtctttaaggcagccaggaaagggtttttgaattatttccctaagttatgtcagagtttcctaagattgtaatttacagggaaatggatgtcacagcctgggagaaggacgtgttaatcactttaatggtatcatatgtagaggtaataattccctttgagtcttagatggagaaaagttatgtacatgccattagttacttgagtgatttttattagactatttttctcatcatttggaaattgtgtaatgcctacgttcagtttttcaaatagaccctgtatcgtactcctagcaaaaaaacgtaaaagtagtttttatctaaaatctttatctcatatcagactaacttcattattagaattttacatgtcatgtacagtaattatgagattttcataagatttctttcacaaagtttaaagttttatgtggtatactttagattctgattttaaaaatagtttctttgcttcatatttctgacatctatcattgaaaatagaggaggggggaggccgaggcgggcagatcacgaggtcaggagatcgagaccatcctggctaacacggtgaaaccccatctctactaaaaatacaaaaaattagccgggcgtggtggcgggtgcctgtagtcccagctacccgggaggctgaggcaggagaatggtctgggaggcagagcttgcagtgagccaagatcacgccactgcactccagcctgggcgacagagcaagactccgtttcaaaaaaagaaaaaaaagaaaaagaannnnnnnnnnnnnnnnnnnnnnnnnnnnnnnnnnnnnnnnnnnnnnnnnnnnnnnnnnnnnnnnnnnnnnnnnnnnnnnnnnnnnnnnnnnnnnnnnnnnnnnnnnnnnnnnnnnnnnnnnnnnnnnnnnnnnnnnnnnnnnnnnnnnnnnnnnnnnnnnnnnnnnnnnnnnnnnnnnnnnnnnnnnnnnnnnnnnnnnnnnnnnnnnnnnnnnnnnnnnnnnnnnnnnnnnnnnnnnnnnnnnnnnnnnnnnnnnnnnnnnnnnnnnnnnnnnnnnnnnnnnnnnnnnnnnnnnnnnnnnnnnnnnnnnnnnnnnnnnnnnnnnnnnnnnnnnnnnnnnnnnnnnnnnnnnnnnnnnnnnnnnnnnnnnnnnnnnnnnnnnnnnnnnnnnnnnnnnnnnnnnnnnnnnnnnnnnnnnnnnnnnnnnnnnnnnnnnnnnnnnnnnnnnnnnnnnnnnnnnnnnnnnnnnnnnnnnnnnnnnnnnnnnnnnnnnnnnnnnnnnnnnnnnnnnnnnnnnnnnnnnnnnnnnnnnnnnnnnnnnnnnnnnnnnnnnnnnnnnnnnnnnnnnnnnnnnnnnnnnnnnnnnnnnnnnnnnnnnnnnnnnnnnnnnnnnnnnnnnnnnnnnnnnnnnnnnnnnnnnnnnnnnnnnnnnnnnnnnnnnnnnnnnnnnnnnnnnnnnnnnnnnnnnnnnnnnnnnnnnnnnnnnnnnnnnnnnnnnnnnnnnnnnnnnnnnnnnnnnnnnnnnnnnnnnnnnnnnnnnnnnnnnnnnnnnnnnnnnnnnnnnnnnnnnnnnnnnnnnnnnnnnnnnnnnnnnnnnnnnnnnnnnnnnnnnnnnnnnnnnnnnnnnnnnnnnnnnnnnnnnnnnnnnnnnnnnnnnnnnnnnnnnnnnnnnnnnnnnnnnnnnnnnnnnnnnnnnnnnnnnnnnnnnnnnnnnnnnnnnnnnnnnnnnnnnnnnnnnnnnnnnnnnnnnnnnnnnnnnnnnnnnnnnnnnnnnnnnnnnnnnnnnnnnnnnnnnnnnnnnnnnnnnnnnnnnnnnnnnnnnnnnnnnnnnnnnnnnnnnnnnnnnnnnnnnnnnnnnnnnnnnnnnnnnnnnnnnnnnnnnnnnnnnnnnnnnnnnnnnnnnnnnnnnnnnnnnnnnnnnnnnnnnnnnnnnnnnnnnnnnnnnnnnnnnnnnnnnnnnnnnnnnnnnnnnnnnnnnnnnnnnnnnnnnnnnnnnnnnnnnnnnnnnnnnnnnnnnnnnnnnnnnnnnnnnnnnnnnnnnnnnnnnnnnnnnnnnnnnnnnnnnnnnnnnnnnnnnnnnnnnnnnnnnnnnnnnnnnnnnnnnnnnnnnnnnnnnnnnnnnnnnnnnnnnnnnnnnnnnnnnnnnnnnnnnnnnnnnnnnnnnnnnnnnnnnnnnnnnnnnnnnnnnnnnnnnnnnnnnnnnnnnnnnnnnnnnnnnnnnnnnnnnnnnnnnnnnnnnnnnnnnnnnnnnnnnnnnnnnnnnnnnnnnnnnnnnnnnnnnnnnnnnnnnnnnnnnnnnnnnnnnnnnnnnnnnnnnnnnnnnnnnnnnnnnnnncagaaaaaatccccatttgggaaagtataaattgtaaatggtaaataatgtgttttcttctctttttttcctttaatgtttttctaaatgattatacaaagaaaatcatctggctgggcacaatggctcatgcctgcaatcccaacacttttgggaggctgaggtaggagaatcagttgagtctaggagttcaagatcagcccgagcaatatagtgagacccctttatctacagataatttaaaaattagcctgatgtggtggcacgcacctgtagtcccagctactcgggaagctgaggtgggaggattgccagagcccaggccgtggaggctgcagtgagccctgatcgcaccactgcactccagactgggcaacaaagcaagactttgtctttaaaaaaaaaaaaaaaaaaaaaaaaaaaaggggaagaaatgaaaaaatcctgtttctattccctctactgatgcatctgactctcacaccacatctaaattagagatgaaggggctctctcagtcacgtctgccctgaattgcagtgggggctctccccagctgaggtgtgaggctgggtctgggccttgcccctttgctccccactccgtgtcccccagcaggtctgccagcgccgagccctctgcgcctccacctgggagatgcaggtggaaagggctgcccagactctctctgccacgtgctcttttgtgttatcgtctcagggaattgggttgttctgactcctagaaaattggctctcgggttggtgtaagtttgtgtagatatgactgcatgtcatttatagaccaatcgatattaaccagtaaattgctcactctaatagtgcacacttaatcaatagcagcaattatccaagtaaatctttcatattcagtcatctgtgggaaaattatattgggagaaaccgtaacaagagcataaacatttctgctttctattttcagtcaggaaagaagccactttttaaaagatttacatttcccaaagaaatgaataattaagatggtaggcatttgctttatttttaatagttgtgatctagtgtgagacatagaaaataagtcttagaatatgaaatcatggcaaaagctgaaggctttttatatgatatgttttactatttttaatcatttatggagtactttatgtttgcaaagcccttgcaaataattttattacacatgtaaatgtttgattggtggcgagtatctatacatagtgggtataaaatgagatggaagcctttactgtaaaatatgtcttacttgtttaaaaaatacgtaagtatccataatcagatcttcccgttgatatgtttttgtgcccacacaaattcaaattgcctttgaggtccatcaaatagataacaaattgagggccaggcgtggtggctcatgcctgtaatcccagcactttgggaggacgaggcaggcagatcacgaggtcaagagatcaagaccatccaggccaacatggtgaaaccccgtctctagtaaaaatacaaaaattagctgggcgtggtggtgcacgcctgtagtcccagctactcgggaggctgaggcaggagaatggcttgaacccaggaggcggaggttgcagtgagccaagatcacgccactgcacttcagcctggccacagagcgagactccatctcaaaaacaaataaaatgaaataaaaaacaaattgagttcactgggctttgtgtggcatcacagaattgaacatcaggagattccatatctactgtatcaaaatccttttgtttttcagaaaaacccaaaactttgcttatgctttagctgctatacttagtagtaacttacaccttccatacttgttgtgaaaatgctgtattatttcaaccagcctgaatttggttcctgcatgtcaagcactgttctaggtacagagactgagggcgtcactgtgtggagagaagtgacatgcacacggttgatttctgacaggccaggacatcaaagcgctgtctgcatgagtgctgatccatcattattttttcattcacaaaactcttttttcctcccttcacaaatagcaagttcctgtatctaaaagagaaaagaaaaactgaaaaaaagattgcttatataaccactgtccttttacattttagtgtatgtgttatacgtatgtgtgtgcatatctatactatacatagtgtgcatgtatgaagatggagatacatgtttgtgtatatatgcttaggcacaaaattcatatgcttctatcaatttgtgtctttttattatgtattatatatttagcatttccccatataaaagggtctttaaaaacattttaatagccacataatctgaagttattgtaaataatcttaagatgaactgtcttatacagaattctacatatgtgattgtttctttaggataagtcttaggaggagaattctgaagtcaaaggctgttcataaatactccccattgtcgttcagaaggtcattccaggttatgttttccacagcacctgagtgcactggctgtagcatctccttgcctatcctgacttgtatctttttttaaaaaaattctaatttttttaggctaacaatgacatttgctttttatttgttttgctagtgaagatcaactcactagtaaattataatttgcatttctttgattactagtgtggttaattaagcattagtttattcttgtactgtcttcttgtagtgctatgaatttactgtctgttccacaatttttttgcatgccaagtgccacactaaagaaatgcttttagaaattaaaaagcaatgcattagatgcggccactgccccaaggagctaaaggagaaataggaattaagaataggaaggtttcaccatgagcaggaaaggcaccattaagatcaggtttgaggctggacatggtggctcacacctgtaatcccagcactttgggaggccgaggcaggtggatcacctgaggtcaggagttttaagaccagcctggccaacatggtgaaaccccatatccactaaaaatacaaaaattagccgggtgtggtggtgggcgcctgtaatcccagtactcaggaggctgaggcgggcgaattgcttgaacccaggtggctgaggttgcagtgagccaagatcgcgccaccgcactccagcctgggtgacaacagcaaaactccgtctcaaaaaacaaacaaaaagatcaggtttgaggttggtttgagggtgctcatcttgcaatgagcaagtgcaggtgagctctgactggagcaggggcgtgtgagggctcggcgacacagagcggccagctacaccttcatctagaacggattcatgtcatctccaactccagggtggccagctgaagactgggccatcatctgttccgaatcattgatatgattgtgtttcctgtgacctgttctgttgttttagacctggtcagcacactcacaacttcaatgaaattaggaatacctttcacacagagctaggcacataagttgataagtacaacctgaaaaggcccaacttagccgtgagtggacataaataggagttgtattaccacaaaagtaaggaaaatatgccatgtacagatatcttgttcatttattatacaaaataaatggtggtctttgctcccaaagacccttccagaagaaaacagttgaatacttttagtgcagaaggacaactccgggttactggtagaacttaaaaactattatttacagtttctcttcttaactgtttataacttttgttcataaaaactggcagtttcctttgtctaaccactgcataccctctttctttaggactctggtttttctgttgctttttgtactgcttccatttgtgatagtcaaaaaagttgactccttggactcaaggaaatatggtcttggtttcttttatcctgggacagctagtcatagtagtggcaaaggattatctcattatcttcattactcattgtcatcccagagaaccttgatgaagagcttttagataaaacatgaatagagtgtcattcggccagttccgtagcaccagcagctcttgttgaatggtgttcggttagtgaacagttttatagtttctgaaaaggtgacacacgttcaatatcaaattaacaaataatgtgtacgtgagtgtgattgaatatcatgcagccattataaatcatgtcccaagaacatatttgaggatataagaaagttttgagtaaatgatacaagacactgtatgtttttttaaaaaaagacgacaaggatgcatctgagaatactgtgccattgtccacagttgactttcttttttcacttcatacttactgtttgtactattccacagtgtgcacagggatgaggtggtagatggggggtgttagctaactctgttgaagcagctaacctgcctgacaatactgtaagtgtttaaaaggtgtcagtatgcgtaatcatctcaccagcacccgccaccttagcctgctgtttctgctgtatcctctcagttagcttacgatagtacccatttgccctggccagaatccaggacttttacctcctaaataattcatatgagtgtttgtctcctccaccctgcccctcccctcctgtgctagttcaggccttgtttccttgtgccttgttcactaagccagctcagtatcctttttattcacgtaataccccccaaagaattagaaaactaggtacccctcacacatttttaagctatctaaaatgttttatcataaatttaaatggtttcaaaggatataattaatttttagcacatagtatgttgcatatgtgatttaattatatttccatcagcagtaggactgcagattcagctcattcagtttgggaaatgtgacccacttggcagccagtacccatcgtaaccagtcactcaaaccaggcacgtgtgatctcagaagaaatctcacttcgtcgtgtgatccagataagcatggcagtggggtcctggcagcagtcactccactctggatttagtccttagaattcattctctcccttcaaagccccccgggttcttgtcctcccccctgccgccaccctggggtctgccactctggggtccagcctctagctccagctccagctcagcctcacccccaccatccccctgaccccatcccccagctgtccccgctgtgcagtgccttgaacgtgctctgccgtgtgtcggcccgtttcctgaatcctcaggcatcagtgcctcacagagctgtgtgccagcagtgtcctcacagagctgtcaagcgtgtccatgccgtgccgcttgtgcctctgccccgcgagggacaccattccccgtcgttgacgtgcattcctcttgttcatcgtgcgagactccccacccctgtgccaccggtctcagtgtctcccacactggagtgtccgtatttcataaacacacgtatgtgtgcatgtatgtatttcttatggacatcacgtacgttggcccttcatatctacaggttccgcatccacagattccaccacccgcagttgggaaacacagtgaggtatgcacagcaacctttcagctgtggttggttgaatccacgcgtgtggaacctgcagatacggaggaccaaccaaggacttgagcagtcatggatttggtatcccaggagtcctggaaccggtccccggcagatagagggtctgctgcttgtgtttatgcatgtgtgtgtatgtacagacagtccccaacctccgtggtttgacttaagatttttcaactttatgatggtgcaaaagcgctcccctttcggtgggaactgtgctgtgagcacccacgtgccattctgtttctcactcgcagtgaattcaagaaatgacgtgaaatgtccaacactttataaagcaggccttgtgttggctgattttcccaactgcaggctaatgtaagtgttgtgagcatgtttaaggtaggctaggctatgctgtgacattcagtaggttagatggtgcattcacttcttttcttttcttttcttttcttttcttttgagacagagtttggctctgtggcccaggctggagtgcagtggtgcgatctccgctcactgcaacctctctcccaggtttaagtgattctcctgcctcagcctcccaagtagctgggattacaggtgctcaccaccacatctggctaagttttgtatttttggtggaactggaatttcaccatgttggccaggctgctctccaactcctgatcccaggtgatccacccagctcagcctcccacagtgctggggttacagaagtgagccatcgtgcctggcctgcattcacttcttttcttttttttttttttgaggcagagtctcgctctgttgcccaggctggagtacagtggtgcgatctcagctcactgcaagctccaccttgcaggttcacaccattctcctgcctcagcctcccaagtagctgggactgcaggcgcccaccaccacgcctggctaattttttgtatttttagtagaggcggggtttcaccgtgttagccaggatggtctcgatctcctgacctcatgatccgcccccctcagcctcccaaagtgctgggattacaggcgtgagccaccacgcctggcccacttactttcatctcaagatatttctaacttactgtgggtatggatggagcatctgtgtctgtcttgatgcactggtagccatttgttctgtatgactgtccctcatgccaaattcatctttgtactcctgttgcctgacttaggacatacctcctcttaggtgcttagtagatgcttcttaagtgagggagtgactgggtgcttctgttaatatcagtatgaacagagagctaagcctgccccgccagcccagcctgccttaagggctgtcttgtaacagcttcgcctcacaggcattcgcaccatgacttccacaggtaggtttctttattccttccccgaaacatcaggggcattctgtgagctttcctgtgtgtccgcaggggcagttctgtccttggaagctgagagcagaagcactgcagggcccccaggccacttcctaggcacacccctaccccttcactgtgccctccccctaccccttcactgtgccctccccctgccccttcactgccctccccctgccccttcactgtgccctccccctgccccttcactgtgccctcccctgccccttcactatgccctccccctgccccttcactgtgccctacccctgccccttcactgtgccctccccctgccccttcactgtgccctccccctgccccttcactgtgccctgctgggcagccttcctgggctgcagggcagatgctctgtggtacctgctcccgctcctctcaggaaggccttcctctccctctctgggtcacctctccctggcacatgcttctcccaaacctgcatctccagtgtcttctctcctcagctacaacctgccatctgcaggtttaccaggcacttttcacgtgactgttccaccatcttgtcattttttatatcttctgtcattttgtaaaacccagctcatctgcctgctgcgtctccatgtccggcctgccctgggtgggtagagacaggttcgcgctgtccctcagatttccacgttagtgttttattggttagtttgtttctgggtctctctcaccctctagggagcagccacggctccccccaccgcccccgctgcctgctgctctcctcctgccgggccaggtgatgcagcgtctgaccacgtgcagtctttagactgccctagtcggtctgtacgctgcagctggattcgttttccaaacattttatttcaaaatacatttctctgtttagaagcacccagttgcccctcttgcctggaactgaaatctcaccattgtgacctgatgttggaaacttgccctggcttctgggacctggccctcttcgtcggccttgtgtccccccgagcctagcacagtgcctggttcacagcaggcagtcagtaaatggccactgagtgaatgaatgaggaaatgcagattccgccaacatttactcatcgaacttctttgttcttctttccatgagaattaaaaccttaagtttctcatttttaaaaatggtcattggccgggcgtgatggctcacgcctgtaatctcagcactttgggaggccgaggcaggcagatcaccggaggtcaggagctcgagaccagcctggccaacatggcgaaaccccatctctactaaaaatacaaactttagccgggtgtggtggcgggcgcctgtagtcccagctactcaggaggttgaggcaagagaatcacttgaacccaggaggcggagattgcagcgagtcgagattgtgccaccgcactccagcctgggcaatagagactctgtctcaaaaaaaaaaaaaaaaaaaaaaaaacattgtcatagtggcaggcacagtggctaatgcctgtaatcccataatcccagcactctgggaggctgaggtgagtagatcacttcagcccaaaagttcaagacaagcctgggcaacatgggaaaaccatatctctacaaatactcgcctgcttctgccactctgcaccatcaatataaataataactaattcacaataatcagtcatgaaagaataaaatggaaaacatgccaaatgcaggcccctgctttgttatcactgcatgccatacacataaagttctctgtcacgtgactacaggagcatctccattcctgtgnnnnnnnnnnnnnnnnnnnnnnnnnnnnnnnnnnnnnnnnnnnnnnnnnnnnnnnnnnnnnnnnnnnnnnnnnnnnnnnnnnnnnnnnnnnnnnnnnnnnnnnnnnnnnnnnnnnnnnnnnnnnnnnnnnnnnnnnnnnnnnnnnnnnnntagctgagaatggctgaggagtgatgacctggtagtcctcctcccagacctttcccttcacccagtgactccgggatctgcaggggtggcccagccagtcccggggcctctccgttccccagctcttgattctcccaggactacttctggctcttgtgggggccacttggagccctgtgatcaccttgtgacgcttggagccttgtgatcacccacaccctatacagctccagtgggacatctgccatttcctgagtgccctctcccgccagccagctggtcactgtggcatccacacccacatgtggttcttctgccttcctgcacaccgtggctcaccaatctgcttgctgactctgcctcagcacctcgttacttcacttccttctccatctagcgtggtttccatgatccacatctcacacgtgcctttcccaaatcccaaaatgcctgttccttcattcttccactgcacatatctcagatacctgcgcttttgacaggttcagcctccagcttcctctgcaaggacacccagccgctgaggctgcaggaggaattcccacgtccaagcatctgcagtgatgcttggcagcatcgggtgcatcatcagcactgcagggccttcccgtcaggttgctccggtctctcccactgcccttttagaccatctctacctctctcacgcctcccacccctccccttcctcctcacttttaaagacgagtgaccttccccctgctttggagccaaaacagaattctggtagcacctcacgtccctagtcctggacacactcctgctgaggtcagcgggcagactgtcctccccgcagatggccctcggcccacatgccctgacgcctggaaccctgagccatgggtcatcctttcttcctaatgtgtcatcagcccttctccagctacagcctcctcctctgcgtttttacacactcaagtacttggttaaacacagacactgagggtctcaccttctgcggccgctgtctgcctttcctcccctgacagtctggtagtgctgacttccctagaggttcctatagctgcccatctctctgcttccctatccttagtttccacagattttttttttttttttttgtaagacagggtcttactctgtcaccgggctggagtgcagtgtcatgacttcaggtcactgcaacctcagcctcctgggctcagatgatcctcccaccacagcctcccaagtagctgggactacagatgcatgccaccacacacagctaatttttgttttatagagacagggtttcaccatgttgcccttcttgagctcctgagctcaagcagtctgcctgactcagcctgccagtgtgctaggattacaggtgtgagccaccgcgcccggcctttccccaaatcttattctcgtctgattccagtccaaccagctctcaacaaagctgctaatggctttgtctggaacctgccggatgttgagttcctctgcaggctgcctcctggagacatctgctcttgaacccaggaggcggagattgcagcaagtcgagatcgtgccactgcactccagcctgggcaatagagagtctgtctcaaaaaaaaaaaaaaaaaaattgtcatagtggcaggcacagtggctcatgcctgtaatcccagcactctgggaggccgaggtgagtagatcacttcagcccagaagttcaagacaagcctgggcaacatgggaaaaccatatctctacaaatactcgcctgcttctgccactctgcaccatcaatataaataataactaattcacaataatcagtcatgaaagaataaaatggaaaacatgccaaatgcaggcccctgctttgttatcactgcatgccatacacataaagttctctgtcaacgtgactacaggagcatctccattcctgtgcctcgtcctcaggtatcagtcgcaagccactcgcgggctgaagtcagcccacagtcctccttgaagtcaacagaaatgaactactgagccacgaggggcctagacctgggatccgccagcgttttctgtaaaagaccatagaataaacattgtagacttcctggccatacagtatctgtccagctcctcagctctgctgtgaatgcccagctcttccatggtagcacagaaccttatcaccgtgcaggtgcacacgaggctgggctctgggttcctgtgagctctgcctaccaactcaggcagtagggggtggggggcgtccaaaggatgtgcacagattgccagcaccaggcccagctgctggaacatcctcatagctttactcacatctacacggacgccttaagttcaccccatcagtgcagggagacaggggccttcaaatgtgatgacacgacactgctgtggcctgtgctcttggaagcctgcaaaggccagcacacccgaccctcctctgcctcacctcctgtgccaccccatcctcacctgcttccccagcctctcctcatccacacctgctcggcccctcctccaccgcctccctccggcccgctggtccttactgcatcccctcgggccctgcaccctgccctctgctccctgtgccccccatgcctgctctcgccttgttttgcacacattctgtcctcttctagggtctccgccccctccccttccctgattaactcctgcctgtcctcactgtaggtcatgtcctgagggaagagggccccagcctttctagcaggaaaggccagagccttaggcctagggaaccaggaagggagcagttattagttgcccctggatacagaatctgcctagatgcatatatagaactggttcagacttggcacaatctctttccctctcactctttcacatttgcaattcaaagagaatatacagagccatttgtattatataaagtgattattgcattgaatttagactagagaaggcatttggagatcgttttagtaaattatcgtaaccaatctaaaaatacttctgaactgtcaaccagaacacagaaatcctgtattacttgctgtagtctggacagtttaggggaacgtggcaccgatctcatcttcaccgtcgatcagtggttctctgacttggtccagtggccgcacaccagctagtgaagaaaaccacagactccaactgcactgtgtacgctctggtgtcctcatttccaaaaaaaaaaaaaaaaaaatctacaagatagaatttaagaaatctcatttgagttgccctgctaatatttgcagctcgctggtgggtgccgtggaggccagtactcaccgtcaggctgtggcaggtacagtgaaaggaaaaactccatgagagaacggtggaaagttcacctgagagtgaaacgcatgccagttagagtggctgaaaaatagcatggacaacaccaagtgccacgggacgtgcagccgtgggacccctcactgctagggaaggcaagatggcgcggccacttaggaagacagcttggcggcctcctacaacactaaacatactcttaggtacaacccagcaatccagttactgcattacgctcctggatatttcacccagttatgccgaatgcttatatccacacaagaatctgcccaaagatgttgataccagctttatccatagttgccaaaaactagaggcaaccaagnnnnnnnnnnnnnnnnnnnnnnnnnnnnnnnnnnnnnnnnnnnnnnnnnnnnnnnnnnnnnnnnnnnnnnnnnnnnnnnnnnnnnnnnnctggcctgtctgaagctcaaggcccagcacccgttcctttccttacacatagagtttcactaggcacgcacacgctgactctggattgatgaagaaacagtttgggaatttttaacagcatcgttcacatttttaatgcctgcctcctgcctggcactgtgctcagcactttcatgtatcttctttaattgtcacatctgtgaggtgggacagatgacctcagctctgtaaactcagccattgctgagcctgcagtgtgagtgtgaggccacatgtcagaaccccggaagacacaagccccactctcctgccttcaacacagccccccacaccgccgctgtggctggaattggagcaggtcgttagctcctgcctgaggaagcccaaataaaggactgcagaacaactgtagtgcaaagctgagactcattgccctcctaggcgtttcatgagcaggtcctgagttctctgtgtcccggcgtggagtgcaggaggcgtggaaagggagtagtgcgtgtgtgagttagtatacagaagaagtgtgtggcaggctctaccacacgtttttaaaatatgtaaactcctaaacttcttgtcagagaagcgcttggcatgcacacaaaatcatttagctaatcttgagaaacatattgtttaattgtctgtctcccttgctagatcataccactaatgagtgctcgttcactaacctccccgccagccttgcagtctctgtcaggcaggaggtacttaaagcatgtttattgactggctgcagaaatgaggacatctaccgtattcaaagatagtgcccgttacattgagaaaagacagagtgagcatccacttttagcttcttaaaaggtttaaacattctgatcttattttcccattcatttgcctaatggctgtcctttctgtattgcacaagggcaaagataaacacaagagtctgtacgaatcagccagtgtgtcagtaccagccagcctttccatgttgaagccgtaacgttaagtgatgtgaaagtatactgtgcattgccacacgggcctggaacatgttgtgttcacccagttcattgattttttcatattgataaattaaaattatgaacatataaagccagttattttagagtcatatgcaaatcttacagatacaaataaatatgtccaacacatagcataaaatttccttattgattttaaattgacagaaatcttaagataatcttgctaaaaaggaaaccagtcatatagattgagagatgtgcggagctttccaataaaaagcctcttcccgatgttctatcggttgttgaattgtaatgtttttatgatttgatcggcttgaactgtacctcacgcttggctctcttattgcctaattacacgtgcagcgttgacaaatggcatgcccctccgtgccgtcagcacactgaccttgtcaccattactaacggctggctggcgctgcttccagcaaggtgagcagctgtggccagtggctatgcgtttgggtcatggattccaccatgccttgcatgtgtgtttggtcacatgttctgccgtgtcttgcagagctgcagaaactggagggcagcagtggacctgtgcggacgtctcctcacagcccacggccagggctacggcaagagcgggctgctcaccagccacacgacagattcactgcaggtgagaacacctttcaggtgctggagtttaacctggcttatcacagtctggggacatggacaggaccatggcctttcatgccaataacaaaaagtatgttttcatatcctgcttctttctctcctaattatattgtatatactatactggggcactggaattctcacttcggcccgtcaggacgcctgtgcgccccagaagcacgctcacaagtgcccacactcagtctcatggtggaaccggcatggctttgggtcagcaggtgggttcgcctcacgactggcagtagcaactggcctgtgcggggctctggggcgtgtctgggcccggtaggaaacagtgacaggagcagttggttctgtccaccccaaggacggagggtccatgtgccatttgctcctcgtggtatatcacttgctctgaaatttaaaaaaaaagaaaaaagaaaagggaatgcacaaaatagacttgtgaacaaaaggaaactcatctgagaagaaggaacagctgcaaacgttgatacattcttacctttccctggggagttttttaactgttcttctagcttacatgggaatcccccgggactaaacagatcaccagatccttcagaactgtgatgagcttttgaaaggagcagctctggggagccctgacagcttagctatttccagcaggctccttctccttctttctcttcccccaagagccgacaagaagagccgctctagctttaaatgtactttcccccatcacctctccatccattggtttgccaaatcttaggctgttttcctatcatttctctccaacccaccaccacccacagttcgagctctcattgcagtgttgctttggcctcttttatgaacttagttcaagtttctttattcacattcattccataaactacctccaaaaaagcacacttttgatcatctcactttcctgctggaaaactgtgcccggcgcagtggcgcattgactgtagtcccagctactggggagactgaggcaggaagatcacttgggcctggggcttctgggccgtagtgcactttgttgatcaggtgttggcactagctcaacaccaatatggtgacctccctagagccaggaaccaccaggctgcctaaagagggtgaaccaccctcctttccaactaggtctgaaacggagctagtcaagagctggatagtttcccattggctaccatgtgaaatttcatcttctcgtgttgtatgcaaaccctcagaccatgacaggctatgtgtacactatggaatggttaaatcaagctaaatcgcatgcattgcctcgcatgcctttgtgtgtgtgtgtgtgtgtgtgtgtgtgtgtgtaatgagaacactgaaaatctgtcttagcaatttttagtatacattgtaactgtgtcaccacgtctacaatagatctcttgagcttattccttgcgtcactggattttgtttcctttgactaacatctctcaaacctcccctgcccggccctcctccccacccccagccccggcacccgccatctactctgcttctgtgagttcagtgttttcagattccatgtgtaagtgaggtcacacggtgtttgtctttctgtgcctggcttgtttgtctaacgtcatgtcccctaggctcatccacagcacaaacgacgggatttcctccatgaaagctgagtggtattccactgtgcgtcatgccacgttcctttatccgttcatccttcagcggacacttagtgaaattcattcttctcatcagtaaagtcagatccaattaggtcatttctaaggtacccttttaatcctaagtctctggctctgcagctgtctaatgcaaattcccaccattttcctgaatgtacccctgagagcacactgtgctctctcgtatgttgtgttttgtccactctgtacctttgtccttacgttccctgaaccagcagacccttccttagcctgtggccccttgaaattctgcagccctgagagctgccctcaaacacaacccatccctgcgcttcctctccttcctgctcccgttcccgccgtcattcccccgccctccactaggtggcgcattcctttggtgccttttcattttcatgacacctagcacagtgctttgcacacagacctgctcagtaagcactgtttacttattgagtaaacaattatgtaaaatcattcacattgttattaagctcaatagtaatttcttcttagagacagggtctcgctatgttgcccaggctggactcagactcctgggctcaagcaatcttcccacctcagcctcctgagtagctggaactgcaggcatgaggcatcatgcccagcttcaagagtaattttttaaatacgattgtgtaaatatgcaaagatagaaagttaggttagcccttattttaatatatgagaaattaacctctaacaccaactcataaggaatagcaaattctgaactggatatatgtagataacctattgtttccattgtattttgtttttagctctggtttgtcaggctggcactactagtgaagttgggccttttccagaatgctgagatggaatttgaacccttcggaaatcttgatcagccagatctttattacgagtactacccgcacgtgtaccctgggcgcaggggtaaggccatggtatttaatatttgtacatttgtctgtgtgtcgctctggtttgctttgatttatacataatttcgtagcctcagttttccttatttatccagtcttgaaaaatcagataagtacccagcaacaagccttgacttacagaatgctcccactccgatttaccgaaacactgacctggaggtgctccctggtgcatctgtttgtacatttagcagctacgtgtcaagcacctgctctgtcagggcagcatgatttggtgcaggggccgggtagtagacgtctgagctgcgctccacagggaagagccgtcccatatcgggacctggcgcacagagatgcagagcggtggaaccaaacgtgtccgtgcatatggcacacgccgtgacattttccgtttgtctctattctgatttaatttattttaaaaatctggttgtggttcaccctttgggtcacggtcacgaccattgtttggaaaacactaggctacagcatagggtagttctaggagagtgacaagaaaccaccagttgggaagggagaagggcgggttacggagagccttctgcagcactgggagccttgtgcagtgtgcgtctcttggtggagaacctcataaatatgtttgaagcctctcatgtgttcttaaatagaaaacagtcctggcaggatgtcttgtgagggcagtgtaagcagctattgaaagcccacgccctgttgtcaggcatccccagttacatcctgcttcccccattgaatcgcgtagccttggaggagttatctgacatctctgtgccccagtgtccttattggtaaaacagagatgccaatcctccttgctgcctgggttgtcctaaagatcaaatgatgtcacgtgtaagttgcttggaataatggctgctatctagtaccaactgtatttgctggttttcttactctcttccgaatgtatcagtaacatgggaaagtctcgcactgccgcattttgcaggctcgattgtcagcatttgttggctgcagcagtggagctacagagaatggtcctagttgtcaggaaatgcagagcctgattggaggtagaaaatatttaaaaccagtggtacaagagatgcaaaggcctgattaataataaaataataattcctatagaagtctcagaaaatttaaataaacattctgttgaacttggttgatactagtaggtaaatagatgaactaaaaaggctagaagtaaaaacaaatctttgaacttctttgtgtgttgtttttttggttaaaactcagctctgtttctttggaggggcataggaacgaatgtagacgccggctttctttattccccatgctctctcctttatcatctttaccttcctccaagtaggacgggtgggaattggtccatattactctgagttatcccagaattgatggagatttttatcatttttagtataaagtgttttttgacctttagtctcactggtattaaaattgtttcttccttctgactaagggaatttgccccttgtggaaaagaaaaaatgggaagggtaacttttaataactaaaatagggcataaatcaaagagattgtcttgatggagctggcttgatttcatggaagtgaaccaaccaagctaggtagccacagagtcaagaaggaccagcaacaccactatcactctcggacgtaggactctgtgtcatccagggacgtagacgccagtccttaatgtgtgacacttcctgcccacccactggcctgtccagtcctgctggccttccacatgaccaggaggaacagaccaaagccaggaccgcttgagggtgcgtgttcaggagctctgtctgccgtggcctggccaacaggtggaggaagtggggccagaggagtctcgggaacttgctgaagggccctcactggtgttgctggccaagcaggccttctgtccccaggagtctggcttttgcagccatgggttggataaagatgtctttacctcttccctggggtatttcttctcctgcactccagcctggaagctgctcggtggtcgtgagcactgtcctcgaggagcagggctttatccatcctctctcccccggagcaagtctcgtctacgtccctcccaaagttccgtccagtccgcacgtaggtggttcccacatccgctcatgagttggagagatacagccatggctggttgttcaagggctactgttctaccttgtaaattaactgggctccctgattctgtcgtgtccctttcttgtctccacttcatcgccaatttgagggtcatcctttccgtgtaagaccgaatttccagcccaaaaagaatggggagcctgtcacttggtaggttgtgaagaaaagatggaaaggttaaaggcattgttaattggggaagtttgagggtgtttctgtttaatcagttatgcctggtagctatcatagtcaagaaacagctgttttcctatttcttacacggatcagccttgttttcccccatcccagcataaataaaaccatctcttccctctgcctgactgcagcctgagcatcgcctccaaccccgccctcccacgtggttcatagtcccgggagggggctggacccaggtctgtgggactctgcctgggccggggactggaactgggactgaacagctggttttttaggcattttgtctgctgctaacagaaaactcagggcattgagcacccaggccttaatcgaaaccaccagataccctgaagcgcagagctgcaccaagtgctctggtttcttttcctactgaggtccgtgtgaattatagattcaaaatgactcctcttacaacacctgcttctgaatttatgacaggtgtttaagaatgagtgtgactgaaaggcagatgtttcctatcatgaccaggtaaaaatatccagcttggctgggtacagtggctaatgcctgtaatcccagcactttgggaggccgtgaagatctcaagatctcttgaggccagaagttcgagaccagcctggccaacatggcaaaacccccatctctactaaaaatacaaaaaattagccggacatggtggtgcacaccagtactaccagctactcaggaggctgaggcacgagaatctcttcaacccaggaggcggaggttgtagtgagccaagatcataccactgcactccagcctgagcgacagagtgagactctgtcctacaaaaaaaaaaaaactccagctcccattggtctctaacctttacctttggccattcaggaatgcccaacatcgccttgtgtatcctattttacagtgtgctgaagactccgtggcactgtttacccatctctaaggagaggattttgatggaaatgacactgagtgccctttaagatagcgaatgaaaatctgtgggtttaggtggaaactgcctgtcatctttcctcactttgaggacattttttcctaaggacgttcagtcaagcctagaaaacatgctttgattcttcctgaaattaaattgcattggtaaatggataaagagaagacagcagctacgcatcattgagaagctaatttaaattatgaaatagacataaatcatacatacattttagcaaaagcgtattaacattcatcctcaataatatgctggatgtttactaatttttcttcccattttgtggtgtaacaaagcataaatgtaagattttgattcattcacttcattttcgcttgcaatatataagcagagcaagttgttaaaatgtgctttaaaaggaggctataattataaaaacttttatgaatgagctttaatatatttcatgtaaatattgggcgtaatttttgcccattcagaatattcataacaagacatgtaatgaatcatgtgtaaaaatcatgaaggttttttaaaaaaaattcatccaagaaaggaacagtattatggttgatgtatttacatgtcaaatctagcaatttcagtcagttcctttcagccacccccaaagcccagccccgtttctgaccctggcgctgtgtctttcacttggttgtttggagactccctcctgcacacaggaagaatcccgaggactacgtgcctggggccgacccagccccgcgcccccggagctgaggtctgtgcggttctgggtggggcccccaaagccacaagaagcccaggtagcactgactctgacctgggtgtcctctcttgattttcctttcttgctcctcaatctccacccccttttcctctgttcctcttctactgcattcgttgcttcttcccctctcagaccctacatccatccctagaacccagggcccagcttcatccatccccagcacccaggctgcaagcgggagaggtggaagctgcttgcatcaagccttttatcagagttcctttcgtgggttgtggggtagtcattgaaagctcacatttgtgtttagaagccaactggctgggggttgtgagcagattgtccacatcttttcattcactggaagtcctctgtgtccctgcaggacacacttaaagactgtgtggctttagctccctcagacttcacacataacttggcaactgagctgttctgtctagaattgtcatgcagcttcaggaattcagaggatcggcgttggtcatactggtggaagatgtcaaaacaagaagaataaaaatagtgtgcagaaaacttgctcttagccactgtcttatctctgaaaattgaacttcacttgcatagtgataccctgtatcatgcatctccagggacagaaaaaaagataagtatatcttaaatttgcctttcctattcgcgtttctctgattttgaaacagaagttccctatccgtgaattcttcagatagttgaggtagagtactcttgcattgcacaggatgtcactgttgtttccagatggatttgtgcaaattcagatatttgatttttctatgttgcccacgtctatttactgtttacttttactttacttttttttctgttctaatagctttttaataaaagctatttacttttgttctaacccactacttccgtaccttatgagaaagtctgttttgggatctggttgaatctattctttgctcaacaaaaattgatgtttatttaaatacaaatattaaatactcggaccattaacaaatattttttcatatttgccttagacatttttgtaacaaatgaaagtacccattgctgatacagcctgtgaacctcctcccaattcagtcccctcccagaggcagtcacaatcatggtttgttgtgtattcttccaggtcatgtttttacatatttgcttcatacacacacatatacatacacacagagaaatacatatacagagagagactattgtcttataagctttgtaaatgtacatcatgagcatatctgtcttcatttgcttttttttccccactttccattattcatatccatccatatccgtatccataaggatgaacaattaggatctttccacctttcggctattatgagcaatggtgttatgggcatccttgtacatttccctttgtacatgttcaggcgtttctctgagctgtaaatttaaagtggcatatgtgagagtgaccatgctaatttccactcccagccacagcctgtcagtttgtttccccactcttgtgtaactaaagattgtcagactttcaccagtgagtctaaaattctacctcctgtcgcaactgacgtctttctgatttctgccgaattatgtgtcctttgtctgtcggagtctcctctttggtgactcactctttcataatcttggcctgtatttctgttgggttatctttgttattaattggttgaggttcattctatatagtaggtatttaatccttcatctgttttgtatttgggaaatattaatatcttctcccattctgggaaatactattttcaaccctgaaaaaataattctagtttaaaaatacaaacataaccttttttgttcgcaacatgacatgttttaggagtatcttctttattccacatactgttatatcaggaataataaatgcaaagaaatcatgcctatgtcattgccaagtaggctgagacaagtaaagacatttaccagacagctttccaaaacgtttcctaagggagctgctgcacactgttgctgggaccttccgctgggtgtgggaggagctctgcacactgttgctgggaccgtccactgggtgtggaggagctctgcacactgttgttgggaccatccactgggtgtgaaggagctctgcacgctgttgctgggaccgtccgctgggtgtggaggagctctgggagatgcggtgttgggaagagagtctacacagttgctgacttgcagctcttcacctggagcttccaagagctctgaggcaggcccgcagagcccctcgtgcacacttgtcaaagatgctctctctcctggcatacccttgaggccctaggccacctgctgccctcgccgtcttccatcgagtacagtgggatgcacttaacgtgagtgctcccgggatctcatcccacagagtctttggccctgtagacagacagtctctgtaatcttgtaatctccccacagcacagccgtctgccttcactggcacctcagcatctgcagggagcatcccggtcccaggaaacatcatccagcccagagggcggcagggtcgccgtcgccatggatgccagcctttacccagcactaaaagtatttttgtttttgtttgtcttaaatgttgataacttcataataactatttacgttagggctttaaaatacctttccaaaatcctacaaagtttctcttttgagagccattcttcagatccctgtactagccttctttctttaattttcttttagatttttttttttattttttaaattgttacactagtgcagattgtttctcccattatagggtttgcagtcatgaaaagtgttgatagggattatatccatgaaaatatttctagaacattcattcattttatattaacagcttgcattggtgtggtacatttgttacaattgatgaaccagtattggtacagcattattaacaaatgtttatagtttacacttgggttcactcttgtgttgtacatattcactatgttaaagaaaattaaatgtccattcctgacaagtttaatttcatcctctctcaggcagttaaatttttccagacccccaccaccatctttttaatctgttgtttggaattacccctctcgttccaaagaaacattcacaatggcagtgagcatgtaaactttcatagtgctttgaatttttaaagtaccacattctgcattagattgctcacttcaagtttccatgcaactagagggaaaataggagcccaaaagatcttcccgctggaaataaagcagcttgattatcttcactatgcagtttaagaagtatagtgctgcttctaatactaaattcagatctgcatgtttagactaagttacaagagctgtaatgacgtcacaggaaatggtacttcagaacttaatccgtgcggattaccatcaggtcaaattaaagtggatggggcaaacacttccattaatcggatgccgaatctctctactcttccatcagctgtctgctcctctatgtgcataaaggcacactgtcactggatctttcttcctttttcatcctccctccaaaatcatgaaattcacattttgagttctcaaattaaattctgaaacttttttttatcaacacataaccatatgtgatatctcagaattaaatattcagcatgtttccagtgtcggattttatttttcatgacaaaattacctcaccttgcagagtgaccacgttctgctttagatttccaggtcacaatgctttgcatcagaactcccgagcgttgatggttggacatgtgatcgctgctttatttgttcggagaaggctcgttagttcatcttactgcttttcactttgcccaccgtttttatgaaatctggcattttcagtcttttcttagaacaaactactaaaaataggggaattttcagtttggggttccgtatctaccatgagaacacccaaatggagacctctccttatcctgtctgcacaagatacaggccttggccagtcactgggctgtagctgaagccacacgtggattgcacatgactgtggcagacgcgtacagaggcagtgacccaagcctcagtttgtcttcatgcttcagggctttagttaagcaaatcatttaaataagaaatatttaaggtatttttttctcttaggactttctcactgtttttgtgtttggtttgttttgttttgtttttaatttacaatgccacattaaagtcaaaaatgacttgttgagagctgtaagtgtgacactgtgtgcttggccgggcacagacaccaagcagtatccccagcgttgagcacaggcaaaccaaaggcatggcttatcctgcctgctgaggtcaggatagggaaggacacacccagacaggcagagacagtgggaaataaatacaaagcagtcttcccagcaaagcactcgcgtaacttgaaaatgagacggaaatgccagggcaaacttgtaagtttgtgccttactgaagaaagctgttaaaattgggcaaagggtctggaaggctcccgcagacccttctgtgaggcaggtggcacaggcgtccaggcatcatgtcacacctgctgcggcctcacggcaacctagctgcctctgggccctcccgccctagtttgcagtgacacagaaggctgcagagaggatgtgagccacccagcacaaacagctagtgagtggcggaaggtagcataccccactgaagggaagctgaaatgtcatctttgttccctttcatttttcactgcccagcaccaaggcccgggcaattcctggcacatttctcttttctatagtggcagcacggattttcagcacaacaagggacggtctgaaataaattttgtaggagtattttcatttaatgttttctaaatgatgaatgagaacacttctacagtatttataccaacctagattttggcaggtcacaactatacatgggaatcttccggaaaaatagatccactaggaattgtttttccttacagattttgactagcttctcctttttttttcctttccaatgctctttctccctgcaggagagagacgggcctcagggctggtgtggaagccttgcatattttatctcgcttgacaaccaccctcagcatggaggatttcagtgagattcccagggtagctcttcagagacaggggctaggtttggccactgagagaatcagcttaaaggtatttttatgtgcatttacttaagaacaaaagtatgaattacaccaaagcagcttctgtatgcatcttgttgaagaggggagtagtttccttgaggacacggacctcgtggctgtcattgtgtgcacccagtgcaggccctcctgcgcagcgctaggagctgctgagtaaatgtcagctcagtgaaattcacacaccttacctggagctcacagatggtttctccagctgcttccatttattgttttaattctgtgatctatatattttttctaggaaggggtgtttttctttctgatttaattccctacatttttctctttcatatgaagttgcagataatgtttttccttcggatttttattctttaagatttttaacctgtgcaagactttttcaatgatacaagtcaaggaggatgaagatctttttccacttcagtcttcactttgctccagctattgctaagaaaggcacaaacaatgacagcatatttaaggaagaacctggccggcttgggtcaccgctgctgtctttcttggttttgcgtctacctgggagagcccagcttttaggttcccattgagggaagcatgagagaggattgtttgggggatgctgccagagcttccagctgacagtctctgcagagcggctgccaagtggcctggtggccgtatgttggcagtttttgatgaattgggattagggaatgtttgtttacttgataaccgagtgtctacaaggagaggtggcagcgtgagggaatagtgccaccataatgaggacacagccagccatctcttccctgccacagaaccccaggcagtccccttcaggctacagttttccatctggaccgagggactggccggtgcagcaggaggagccgatcaccctctgtgggaacgaggatgcccagaagttccagttactgtggtttgtatgttcttctttttgagatggagtctcgctccgtcgcccaggctagagtgcagtggtgcgatctcggctcactgcaatgtccacctcctacattcaagcagttctcctgcctcagcctcccgagtagctgagattataggcgcatgccaccacgcccagctaatatttgtatttttagtagagacggggttttcgccatgttggccaggctggtctctaacttccagcctcaagtgatctgcccgcctcagcctcccaaagtgctgggattacaggcgtgagccaccgcgcccagctgagttactgttaactgttactgggggggcaggggaatggctcattaacatttttttaaataacattaacatttttaaaatgttaaaatttaattctgaaagaattttgctacattagcgctagttttaattgtgattttattcaatatgtcccccaaatgtaaggaagaaattggtacattttgttcacaaaaataccctccccacctcccaaaagcagtagaaatgggagtgccatagcacgggggagatttgaaaagagcccggaagttgggtttgttggaggaggaggatctgagcacagctcagctccacctgctccagcagcgcagagtccacgagtacaagcaggtgtttggtccccaaggcctcacagaagttcaggcagaatttcatcactttcttttcccttaacccccatttaggttttaaacgcctgtgtggtttttaaaagggtagaagtagcaaggaaacaatatatatctaatgagggacattttcctgtgtgatatgtaatgaatgcactatatgtagtactaattacctgttataatgaaggcactgtatagtaccgattacctgttttaatttgatcctaaggaaggtcaatgtgcattttgaggcattataaaaatatagttgatattacctgataacctttgagttagcgaattttaatttcacatcagtaaggtactgttttagagcagtgcttctccatctcagcatgcacaggagtcacccagcctcttgtggagggcaggccctgatgcagcaggtctgggcagggcctgagactctgaagttctaacaagggcacaggtgataagactgcagctggtcagaatgtacctttaatcaagtattaatattactctttcagctacagctggccactatatttaatagtatttctgagaaaaaaaatacatattttaagtctcaatttgagatcccaagaacacagtccttcaccccaaagaaatggatctgattttatcttttttcatgtggcaatccccatatctgaaccatgctcattaaaaactccattttccatctaataccttggagacaccatctttattgtatactaaagtatatatgtattccctttttgtaatttacagaaaaatcgagtagagagttctatataccctcttttcttctgcacagtttttaataacatcttgcatttttattattaataagtataaaaattttgcattagcgtagaacttttattataattgataaaccaatagcggtacattgttgttaaagtacatagtttaccttagggctcactcttggtgttgtcccttctgtgggtttcaacaaattaatggcgttgcgtgttcattgtactgtcatgccgaatagtttcactgccctgtgtattaatccccccaccacccctggattaatacccccatcacccctggattaatctccccactacccctggattaataccccatcacccctgaattaatccccccatcaccccaggattaataccccatcaccccaggattaataccccatcacccctggattaatctccccaccacccctggattaatcccccaatcacccctggattaatccccccatcaccccaggattaataccccatcaccccaggattaatcccccaatcacccctggattaatccccccatcacccctggattaataccccatcacccctggattaatccccccatcacccctggattaatcccccaatcacccctggattaatccccccatcacccctggattaataccccatcacccctggattaatcccccaatcacccctggattaatccccccatcacccctggattaataccccatcacccctggattaatccccccatcacccctggattaatcccccatcacccctggattaataccccatcacccctggattaatccccccaccacccctggattaatcccccaatcacccctggattaatccccccatcaccccaggattaataccccatcaccccaggattaataccccatcacccctggattaatccccccatcacccctggattaatcccccaatcacccctggattaatccccccatcaccccaggattaataccccatcaccccaggattaataccccatcacccctggattaatccccccaccacccctggattaatcccccaatcacccctggattaatcccccaatcacccctggattaatccccccatcagccctggattaataccccatcacccctggattaatccccccatcaccccaggattaataccccatcaccccaggattaataccccatcacccctggattaatccccccaccacccctggattaatcccccaatcacccctggattaatccccaccacccctggattcatcccccacctacccctggattcatccccccatcagccctggattagtacttccacccctggataaatccccccaccatccctggattaacccccatcacccctggattagcccccatcacccctggattaatacttccacccctggattgatcccccatcacccctggattaatcccccatcacgcctggattaatacacccactacctctggattaacccccatcacccctggattaatacccccaccagccctggattaatcccccgccacccctggatcaatccccccaatccccctgggttaatccccaccacccgtggattgatcccccctcacccctggattaatccccccatccccctgggttaatcccccatcacccctgggagcttggagtctttccattgtctccatagtttccccttttccaaaggtcttatagttggaatcatacagtatgtggtcctcagattggcttcgttcacttaggaatgtgcatttagggttccgctgtctttttctgcttgatagtacgtttcttatctcatgaataatattccattttatgtatataccatagcttatttatccatttctctggtgaagaacatcttggttgcttctggtttttgacaattatgaataaagctactataaacattctttttcagggttttgtgtagatacaagttttatcacctttatcagttccaatccttgggtaaatctctaggactgtgattgctggatcttatggtaaaagtattcttagccttgtaaatatctgccaagcatcttccaaaactttcatactattttgctttcctaagagcaatcaatgagagttcctattgattcacatcctcagccagcttttggtattgtcattttttggatttttcgctattctgataggtgtgtagtgttacctcattgttttaatttgcagttccctaatgacatatgatgatgagcatctttttatatgcttgttattgataaatctttattggtgatatgtctgttcagatctgttgcccatttattaattgggttgttttctcattgtctgttttttggagacagagtctcactttgtcacccaggctggagtccagtggtgcagttatggcccactgcagcctcaagcccctgggcttaagcagccttcccacctcaaccaatggagtagctaggactgtaggcacacctggctagtttttgtattttttgtagaaacaaaaaaaagcgatcagctcgcctcagcctccccgcgtgctgggatcccaggcatcagccaccatacctggcctgttgttgatttttaagaattcttcatatatgttgaatacaagttctttatcagataggtgttttacagctattttcttcctatctgtgacttgtctcttcattactttaatactacgttggacagagcatacgtgtttaattttaatgaagtccaacttactgatttttttctttcatggatggtgtttttggtgttgtatctaaaagattatcagcaaacccaggtcactcagattttcatctgtgttctgttctagaagttgtatagtttttgcactttacatgtagtctgttattggagttcattttggggtaagatgtaagatctgtgtctagattcattttttttttttcatgtggacgtccagttgtcccagcaccatttttggaaaaacctgtcctttctccattgaattacctttattcctttgtcagagatcaaactgactatatttgtgaggaccaatttcttgtctttctgctctgggccactgatctatttgtccgttctttttctaggaccacacagtcacccagtcttttttacagtagctttagagtagctctgtaaggtgggtagtgtcagcctgccagatttgctctctttgatattgtgttggatgttctgggtgttttccttctccatattaacttcagaatcattttgttgataaccacaaaataatttgctgagattttgattggggctgcatcgaatctgtaggtcaagttgtaaagaactgatattttagcagtattgtcttcctgtccatgaatgtggaatatctcttgatttcttcagctctgtgaattttttcatcagagttttatagttttcttcctatagctcttgtgcatattttgtccattttatacgtgggtatttcacttatttatgtagaaatgatagtgtgtttttaatttcaaattcccatcatttattgctagtatctaggaagccagttgacttttgcatattgatcttgtatcctgtgacttttaatcacttcctagtttagaagtgtttttgttctttgagattgttctttataattatgtcattgcaaacaagtagttttatttccttcttcccagtctgtgtacctttggttttcttgtcattgcattagctcgaacttccagtacaatgttcagtagaagagataagagggaacattgttgctttattcatgatcttagggggaagtcactgagtttctcactcttaagtttgttgttagctgcagttgttttgtagatgtcctttattaagttgaggaagtttccctctattcctagttggctgagagtttttatcacgagctggtgctggattttgttaaatgcttttctacatctattgatatgatttttgttctttagcctgtttgatgtggtagattatgttaattgattttggaatgttagatcacccctgcatacctggaataaattctgtctggtcatggttcataattctttttatacattgttggatttggttgctaattttttgttgacttcagttttcttagatttagtttgctaattttgttgaagatttttgcatttatgttcatgagacatattggtctacagtttttttttcttgtaacgtctttgtctggttttggtattagggtaatgccagactcatataagaagttagaaagcgttcctctgcttctgttttctgaaagagattgtagagaactggtagcatttcttccataaatgttaggtggaattcacagtgagaccatctgggtctggggcttgctttttggaaaggtttttctttttctatccaagttaccaaatgtatggacatagagctgttcataatattcctttactattcttttactgttcataggatccatagtaatagtccttcacttctagtactagttgtttatgtcttctctgttttttgactagcctggggagagacttattggtcttgtcagagttttattggtcttgtcaaagaatatgtttttggtttggttgattttgtctattgatttcctgttttcagtttcactgatttctgctctaatttttattattatatttttattattttcttattataatacaataatatttttattattttcttataataaaatattttattttcttataataaaataatatttttattattttcttctctactgcttactttaggcttatattgctctttctttccttctagttttcaaaggtgaagctggtttcagatctttcttttccaatatatgcatttaatgctaaaaagcttcctctcagcactgcttttgctgcatcccacaaattttgataagttgtatttttattttcacttagttcaaaatattttcacatgtgcttttacatccagaagcacccccatgtccatgggcagttgtcaggataaggggcagctaactttctgccaccttctcaggtgaagtggcaggagtcacacagcctgttttctcaccatccaccaaactgtattccagatcggagtattaacagctagtctataaattgagatcggagtattaacagctagtctgtacgttgagatcggagtattaacagctagtctgtaaactgagatcggagtattaacagctagtcccaagttgggtttgagaacttccagtagaggtttgtttctgtgcttatcttatagagcttgaagggttcttgagatattctctcccttgtggtaagtgataaaccacacaggagtgattctggccccttctctacttgagacagaaggatggaagtgacgtggcttacatataacttaccatgttgggccggttccacagtgacatgacttacatatgacttaattgtaggccagtcccctgtgtcattatgcggatggtctagaaatgtttatttctagaaaaccgaagtgactcaggctgtaacttaagctcggccagatattctcttgagatacagaaattatttagtggcatcaaaaaagaaagtttaaacattttaagttcaataattgttacctttcttttctccaggcttataatcacaatagaactgttttccatagtgttccttaattttgactgtcttctttttggacctttgttattaaagaccataaacataaagctcatttcagtgtggtcacggcccattctcagtaatggttaatgaatagacagatggatgcattgaggcacagatacattaagtggcttgcagaagtcatacgcgtgttttctcaccatctttcagactatattccagatccgaatattcatcgcttaggcctattttgaaaagcactttactgaatctatgtgattgccctctggcatttctctattctttatctcatttataatcagtgcacgctatttgattttttgatgattgttatctacttagtatacatactacagatcaaattccaaatcctattagaagagaacacaatattaacaaaaagttgaccttaccctgagagatgatgcagccacaggtgatacgatataaagggggtttctcctgagcttcttcctcttcttagcgcacgcaaagccaggcagctctgggtgatggatttttcaagtccagctcccttgcctcctgtcagaggtggaacgcaggctccagggccacatggaatccagtgggaggcccatccccagggccgaggcctgagacgcacctgtgctcagtttcgcctcctccccactggttttcccgggagcacttccggaaccactggctggcttacggcttctcccttcagggtctccttctggggaacccaagctaagcaacctaccattcgagcttgctaaactaaagaaatattaaagaatatctgagcattctggtttttcttttattggaggaggggttggcggtctctactgtttcattcattttgggatcatttctaaatgattgcagtgtagctttggaaattgtggtgtcatccacctgtctcctctgataattgtcgagacatacatacatagagctccatagagaaaaccagcatgtattttatagttgacaccgttaaatacttcacaagaaataaagggatctgtcatcacttctgctgggacatctgcgacgcctccttcaagtgtgccaagtatgaatgcgtgctcagttatggcaaacaaactcactcagcactgattggattccaggctccatggtccccttctcgatgcgcatcttgcacgcggagcttcagcagtacctggggaacccacaggagtcgctggatagactgcacaaggtgaagactgtctgcagcaaggtaggtggcgctgtcattcttccctgccacggggagaacatgccctccacgccctccccacaggacatgcccgtgctgttccctgcccgtcctgccccatgcaccatcgctgcttctgccttcagaaggctaggtgacccggtttgtgtggcctggtagtcgtgtctcttgctgaaatcttttttagggatggtaagagtttctagcagagcttgagtcctgtaattcttactgcctggtactatgggaagctgaaaggcagagacatctttcttgccaaggctgccagctgaagcttcaaggtcagtgtgccagaccacccctgtgtcccacaagtgcccacacgcacctgccacgtgcagacagaggtaccggagcagtactgaaagcaatcatggtttaagctttcaaatccaagtaagtgcttctgcattatggcaactgtcactcatgatcctgactgcaaaggcagagtcggagtgttttcggactcattcttggttgtgaagtcacagttaatgtgggagccaccaaagtggcacgttattacactaactgacattgggaagaaatgtgggactcagagactttgctgtctacaggttgttatagagtattcatctcagattaggaatgatcctgcctttctacccacgtcacagtgttcctgtataggttcagtgacataaggtatgcggaagtactttgaaaactacaacaacaagcagttattaggagcagcagcatattataatttttgggaaaactaagattcttcttgtcagattcctcctttcacttcctaactgttgtggtagaagttttgcggagttccaagatgatggtgttaacagtgttcctagtaaggaaggaaggggccctctttatccttatctgtggagaaaaaacaggcgtttctaggccccttgttgtcctgggctttgtacccacttccatttttttattaccataacttaaaagataaaaagaaaaattgtttgctttctgtactatatcagttgatggagaatcatgttaccaacttttttacatttcaacacttttcttgaatcttaaaacggggtttaattttatttacagaaatcggaagcacataacttgaaattgagaagttctaaatcagtgactttctaaactatacgaatttttcattatcctccatgtcacattgtaggaaatctttatagtatttgagagagaaaattctgggccatagggtgatttgtggatggaaaagccaagttagttgaagtagttttgcaagtcagctttcctggtcctgaagtatgtcctatttcagaattatgctccttaaatgcatactacaggctgggtacaggggctcatgcctgtaatcccagctacttgggaggctgaggcatgagaatcgcttgaacccaggaggctgaggttgcagtaagccgagatcaagccactgcactccagtctgggcaacagagcaagactctgtctcaaaaaaaaagaaaaactgcatactacagtgtaacgatgagaggagccacttagcactagctatgaagcagcagggacggtggagcagagagcaggagcttcccacaccgctgctctgggcacctgcacttactccacctgacagacacctttgttgcattcattatgaggcagccactgctctgagttccaatattaactcatttaatccttatcacaaccctatgaaggagatgttattatcccaatttacagatggggaaactgaggcacagataggttaggtaacttaggatcacatgagttgaacccaagtcatctggctctaaagtccatgctcttcatcacttgcctggcttcatcactataacatgtcccgtttgaagacagaaggaccgagagtcctctcttccaccctgcaccagcatttctgctccaagaaaggacagtgctgtccggggtcaactgacatctgctcagaagacccctgtgctgaatggggccctgccccttccccctgactgatgcctggagatgggctcgagcctgtgctctgctgggctgggccctcctgagactcttgagggggcttccaagcaacagcagttgacagctaagcatcgtagggttggggagaaacgagaagggttagtgcagtcacatcctaggaacgtttctctcaggctgactgggcgtggggccaccgtcagtgagagagccactcatgcttctcgttccctccgctggtctacagttccacctgcctctcatcttgtgaatacataaccgcacttcaggtatctctcatgtttaaagatacatatcttttccatggcatgatccaaatctaagccaacactccttatggtacttaaatgaggaaatcgcaattcgttctaatcctggaagaaaaacaagcagttggatttatgaaaaggtgtgtgttggtcttcaccttaaaggattttcaccgttaatttcaatatgtaattactatgtgttcctttatgtgctgacttaaaatttgacaccctcttgagagagagagctgcactgtggcacagctggtggatgcctggaccaagagggaaagacccagggcatgaccatatagtcagccttgcctgtccgccacctttggcaggagaagaagcaccgtcgccaacttcctcgctcacttccttgcacgttaggggctcatggccgcatgtgggcattcttgacctttctgcggctggttcagtgttgaactgaagcagtttttatctggatgtgaacagtgggcactgcggggacatggagcaatgcgtctccacgctgtccagaacagctctatctgagcttgttcatttgttcatgcagcaaatgccctttcagcacctactgagtactgcacactggcagttcgggactcaacagaacgcagcctcgccctcagtgagtttacagtttggtagacgatgcttgtttcacctgttccttttaggtttgcagccatcaccaatacatcatgatcctccagaatttaaaaagggacagtttgtgttcatgctagaatttctttactcaagaagtgtgtattagtccatctggctttgccataaaggaatacccgagggtgagtcatttataaagaaaaggtttattttggctcacagtcctgcaggctgtacaagaagcacagtgtcagcatctgcttccagtgaggcctcaggaagctttttttttttttcttgaagcggagtctcgttctgtcacccaggctggagtgcagtggcgctattggctcactgcaacctccacctcccaggttcaagcgattctcctgccttgcctcctgagtagctaggattacaggcgcccatcaccacacctggctaatttttctatttttagtagagacagggcttcaccatggtggccaggctagcctcaaactcctgacctcaaatgatccacccgccttggcctcccacagtactgggattacaggcatgagccactgcgcctggccaggaagcttttaatcatagtagaaagcaaaggggaagcaagtgtgtcacatggtgagaaagacagcgagagagaagaggaggaggagggaggcaccagactttttttgacaatcagatcccaaggtaactaacagagccagaactcattcattgccatagggacggtaccaagccacccatgagggatccacccccaggacacaaacaccccccaccaggccccacctccaacactggagctcacatttcaacatgagatttggaggggatgaatgtccaaactatatcatagtgcaaaatctaaaaatactaaaagccagcccaccactattctgccagtgttgatttgctggattaaagtgaacggcttggtgtggcctttgatcccctctgctctccactggtgagtaaagagagaggtcagaccagagactccagggttctccagcatgacattctgattttcccagaccttcacaactccaggaaatcctcaggaagtcttaaactaaggatgtgttagtgagacctctccgtccgtggactgccctttgctgcattgtttaaagtattcaccacacctgccccaaaccacacgcacacacacagctctgctcaggacacgtgctgtgtgtcccagcactgaggtgcagtcacgtgttaacgctgcatggatgtgtgaggtgctgaatgcattatgttgattaccccctactaatgcccacagcagctgcaagtgattttattatcctcggttcccagatgaggaaagtggcctcagggaggtgaagtgttccccagacaactgcagtgaggcagcgatggagcctggctgagccccatcacacagctccagaagcctcacccttgagcaccactctgcggttctctgtgaaattagaccatcaggattgtggttttttcctccaaatacagacttttctctgatgctttgtaaagcaggggctctaaagtttggtcttaagcgtcacttgaacagttccagaaattttagcaatctctactgcacttgctcctgccaaaaattgctctcagtagattcagggaactgtggactcttccagtgggtgaggagagtcaaacagagtgaaaagaaatgagtccagaatgttaaacatgatttcctttggtgccgttttccattagctcctcctcccgcagggcgtggagagcagccggttactcgagggtagggcgtctagagcagccggttacgcgagggtagggcgtggagagcagccggttacgcgagggtagggcgtggagagcagccggttacgcgagggtagggcgtggagagcagccggttacgcgagggtagggcgtggagagcagccggttacgcggttacacgagggcggagggcgtgtgccgggagcacaatccgggccgaggctcctggtaagggagcagagcgggaagctgatcccccacggattcttagggggccgacttcccctgtgttgaagattcatcaaagactgattcgagtctgtgttcagcatgtgtgttttagattagaacagtgttgagaatttttatatggggcccagttttagcaggacatcatttaggatctttacaaacgagttcagggtacttcgttttatctgttgtctttgagccactgagtgaattagtaaatgtttgcaaatgtgattgcatcagtgaagaagaacatataccacgagttaaaataaatttcccgtgctgctgaaaaatcagtgccgccatcctctgaccctgctcctcccacgcgccctgcaggctgtctccctctggggtcgagagagcttcacagaccatttgggaaagagccaagcaaacacacttctgcaagccatttgcataagtagacataatccatacggaatgatgcactgttcggttgtagtttcattcgtcagtgacctgcatctgcccgcccagtcttgagttcagctccatccctccctgcagttccgcagcctccggcttccccacctcagcttggctgagagtttcacgttcatccaagtgcttctttacagactcactcccagctggaggaggcagagggtaaggtacattttcgtgcactccggaaaagaaacgtattcaacaatgtccatgtagcttttgcttctctattgataattgctaatgtggtagtgagagctttgtttgtaggaagagttaatatcttttctaaaagggttttttgacagatggacattcttcagttttgctgtcttatttgttaagcaaagttagaaacataagtgagaacaggcgtggctggcctctaacactgtcagggccaggactcagggcctggccacccgcacaccgacagtggccagttattgccatcaccgtgcctgacccagagggtttggttgcccttcttttctgctgcttccacagaaaacaaattgattgtggcttaatcagatgagatgggaatgactggcaggtggggagaagaaaggaaaggccgagtgaggatggccatccatcgaggccacttccctgctctttgccattgaagcccatgctcctggaaccccgtgtgtgttcagaatgtgcaagcagaagaagaagagggagcggaaagcactgggcatcagggctttccaggggaatgtcttgacctggctggcagtggaaattcacaccttcagaaacctctagagttcatcgtggccaatcctgggacatggacttaggaatgcccaaccccgccacccagccgtggcaacccgattcaaaaccaaatgcaccaaatgtgaactcgaaggccatagcccttgccagcgacccagccctgaagcgggcatgatagcccagagaagaggcctttgatgtaagatgattcttaaatcgtgcattctttgccttgcttttctcggcagtatgtgttctgtcaatctgtgatctgagtagaaagaagaaagtgtattttcaaggtatgaggggcccagaggacactgtcccaaaagcagtggttgtgagagtggctttggagtcaggctgacagtctggaagcttccaggtccgctctgaagtgccggctgcatgaccagccctccagcctgtgtccgcttcggccttctttgtgcaagtgagagcattgctgatccccccggggtggcgagggggcgcacgtcagtgacctcgcatggtgcctgccaggcacgtggtccgtgtttcatgattctttgagagctttggagcagctccaagaagactcttttactttgaagaggtcccctgggaagctgtggtgggactggaaggtcgcaggactttccaaaatctaagtctctccagaacagagctgctccaagctttagtctccactcaaaagggtccacttagtaagttctcaggtccctggcttagtgccagcttcccagtagtttgtatactagatgccttgggaataaaaccagttccctaaacctatcccgtgctcacccacgacccgtgacagctgccaaagggacagacgcaaaggctccttcctcaaggccccctgcagacagcactttccacactgaaggtgtcagtgacccagccagaaaacctgcttcaccacctcctggataactgcataggatgaaaacatagatttgggtctctttaaatatgaataggttacaaattgcctttttaaatattgcttgagatcaagtggtagtggttatatatggagtcaagcagctgggatattcattcaaggcgtgtaattttcttcattctttggacaaaacacaagcaggtttttaattttgaataattgatcttccctcccatactgtgggcaggtgttgatggttccccaccttgttagcctgaagcctgttcatccctggaccggccatgacatgcccagtgcagtatcccccacggtggggctggcagcagcccctccacactatgcacagagcagtctgagtctggaatcgtctcttcagccttacagctgttccatctgttattttctccaaactcctcttccctgcatttccaagcagcgtcttctcatgattacagtcactttcagagatgagctcatgctgatacccaatgaagaacccagttcagaattttctttttttttcttttttgtttttttgagacagggggtcttattctgtcacccagactggagtacagtggcatgaacgtggctcactgcagccttgacctccccggttcaagcaattcttctgcctcgccctcctgagtagctgggactacaggcatgcaccaccaagcctggctaatttttaaactttttgtagagatagggtctcactctgttgcccaggctggtcttgaactcctggactcaagcagttctcccacctcagcttcccaaagtgctacagctgactataagcgtgagccaccatgtccagcccagaattttcaaattaaacaaaactaaccctccaacatgtttcagtacagtggcctcaatacactattcctcatgcaaagccttcagttgaaagtgctgggtaacttggatttgcctgtgtgttgaccatcagttgctgcctaacagattatctgcagctctgtgggctaaaaccacagggatgtatgaccttcctatttctgtgggtctcgagtccagcacagcttctgggtcgcactggctcaggtctgtcctgaggttgcagttaagatggtgaccgcagtgtctcacctgagggctcagctggggctggagaactgggctccgggaggctccgtcatacacccgctgagttctgctgctgttggtgagaggctgggttcctggcctcatggttctttctgtagggcttcttgtgcgtctcacagcatagcagctggctccctgcagagagggagggaggaggaggaagccacagtgccttgcacggccgggtctcagaggtctctatgtcccctccacctggttctttttgtcagacgagtcactaagtccaggccacacgcaagggatgggaatgagactctgccttttgaggagtgctcaggaatgcatggccgcatttaaactgccacactgtggccggtcagctgggtctgttccacttcaggatccacaggcctctcctggccctgcaggacaggctcccctgcctccactccagcccgtcctggtggttgtgagccgcacttaaccctgccaggatgcggcttgtactgggaggcccatgggctccgagaggacttcccttcaacctccaggcaccttgaaactgcccagcagccaaacctcagagctgtggaagctcctggacgtttcaaagacccacttaatatttaatagtcagtgcagcattaatttcattgctccccgatcccacatatcgaaacctttcacagtttagtacagggatgatggtgaaagagaaaccacagggaaaatccgaggcagtggaattgtttaatttctggttgcttctcctcttatttgtaattaatatccattcagcatctttaaagcttacaaaatgcttcaagtacattctcattggagttccatgatttgtaaaacaggcatgtgaaaaaatgggaagctaaggaaataggaattcagaaaaggtacactgaaggtacgctgaaggtcagcctgaacttgaacccacgtcttctggcaccggacatccctgttcttgtcactgcggcactttgctctgtgtgtggaaagcgtgaagggcccctgcaaatggacatgatgctgcctcctccacaggtttatttttgtgaaatcaaacagaatactgtttgtgcttaaaaaccatcctgcgcccccatctgtaaaatacatcgtccccggtacttcccagcaggcgctaagcaccacccacactgccggcgcctgaccagacagctccatggagctcctgacccagcttcaacccgtcgggaacagctcccagggaatgtgcaggaaggtgcctccaacacccggccctttctgcccctcggcccctgtggtcactctgccctccacagtccttctgcccctgtggctggtcgcttactgctctgtgcatcttcctgaagcacttggcactgttgcctcatctctgtcctcttcctcctatgccctcgcctgggccctcagcagcttccagcagggagggtgtgggtgcagtgatttggatcatgcccctactcctcagagcctcttcccaaacgaaccgggtgtggcgtgctgggcctttattcttctgggacacaaacacgggactgctgattggtctctgatatagaccctggaatctgctccttttgtctggggcaaaaggaaccaaggaggaaattccagccgcaccacatttgcaaacgacacactgtcgggctttttttgcaataactgcatttcctaaataattcagtctttggattgagaacgtgtctgtcactttcctttatagaaataaccttttgtaaattaatgtactgttactttataaagccagacaactgtctctagatagacagcaataaaagctaccaactgtgaactgctgtttcttttcctttcactcatggatgctcttctgcatcacactgggacctatcaattgacattaaatgacacaccctacaaataaaacaatagtcactgagggtcagaaggttgtgtctgatatgcctatgttcctgtcaacaataggggctttctccagctgtccccttctcgggctgaagcacctcagtgacccagatccctgcaggcacttggcgtcgttttgtgtgtccctctgccccagccaggagagtgctttttgcagagggaggggtgtagcctgcctggtgtctccgtgtcctacctgtgtgccctcccagctgggtaggtgggtctggaggggtgtagcctgcctggtgtctccatgtcctacccctgcgccttcccagctgggtaggtgggtctggaggggtgtagcctgcctggtgtctccatgtcctacccctgcgccttcccagctgggtaggtgggtctggaggggtgtagcctgcctggtgtctccgtctcctacccctgcaccttcccagctgggtagatgggtctggaggggtgtagcctgcctggtgtctccgtctcctacccctgcgccttcccagctgggtaggtgggtctgggccaaaagcagctgctgcaggtggagctcccgtcactcacatgctctgcgtttgatgcctctgctaagatggagcctctgtttctgcatttatgcatcattggggtgggaaactctgtttccttttttctagacctttctcttcctgctgcccttctgaaggacctcattcccccttctcccctcattggccgtgatagtccacagggaacgtcagccccagcgcagcttgtgctgagaccaccatggccctgtggtgcgggtcttctctcaggccttgcgtgctcactacagaggtctggggtgtttctgcagggttttctcctccactcagcacgtggagagatcgcccatggcatggagagatggcccagacccacagagacctcgccgcatagaggatttgcccagacccctagaccccgccacgtgaggaggtcacccaggcccgtagggctcccgtggtgtgcggaggcgcagaacaagctcaggagtctgctgacctggtgcgccacaccccggggaccgccagtgggcgtgttcgaggctccgctgaccagggcgctgtcaggtctggttcgggcagcggctttgcctctgtgataggtgtcccgtccctctttcttcctgtgctcccactagcctaagggaagtcagtttcctttttttaataaattttaatttttgtagatacatagtaggtgtttatgggttataggagatattttgatacaggcaggcaatgcgtaataatcccatcagggtaaatggagtatccatcccctcaagcattgatcctttgtgttgcaacaatccaattatgctcccttagttatttttttaacgtacacttaaattactgtagtcacccttgtactagcaaacactaggtcttatttgttctattttttttttgtacccattaccatccccactccatcccccactactgttcccagcctctggtaaccatcctcctgctctccatctccatgagttcagttgtttaaagtttagctcccacagataagtgagaacatacaatgtttgtctttctgtgcccggcgtatgtcacttaacacagtgacctccagttccatccatgctgttgtaaatgacaggataccattcttttttatggccgaagagtactccatcgtgtatatatggcaattcctttatccccttgtctgctgatggacacttaggttgcttccaagtcttggctgttgtgaacagtgctgcagcacacacgggtgtgcagtgatctctgatagactgatttcctttcttttctttggagtatatatctaggcatggattgctgggttgtatggtagctctattttttgtttttttgtagaaacctcaaactgttctccctagtggttgcactgatgtacattcccaccaactgtggacaaggggtgagggaagttaatttcatggtaacaccaagcctttcctttttgtcagtttctgttcttatgatcattcattagaaggcagattcactgaagaatgtcgttttacctagtttaaactggctagattcttttcaaggttacaattttgaaccccaccttgtcccctgagtcatcgaggtagcccaagataacggttaagaggaaacatcctttgtgttggcagcaaattgttctccagtttctgttaagtagtgtcccttgcaggtgaggagaggctgctttcatcctcagcaggtagagaccggggagtcggaccagcggaaatcctcacctcctggggtgggccgtgtggggagtgttaactggcaagacgatctaaattctctacccagatcacagcggctacagcagctttgctttcagagaagaaaacacaaaaaaaagtgcccaaaagttaaaaagcaagtggtaaaaccgggaagcgacacgttgcacaaaacgtatttggtacgttaaaaaggccagaagcacggtgccctgtaggaatgagactgacatcttcacaaaaggtcatcatcagtctcatgtgacattctccatgctttttttttaaagacagggtctcattctgtcacccagcctggagtgcagtggtgcagtccctggtcactgcagccttgacctcccaggctcaggtgatcctcccacctcagcctcccaggtagctgggaccacaggcgcacaccaccatgcccagctaatgttttgtatttttgtagagatggggttttgccatgttgccccagctggtctctaactcctgggctcaagtgacccacctgcctcggcctcccaaggtgttgggattacaggcttgagccaccgctcaatcccagaagtgttgggattacaggcttgatgcttttcttaaaaaacatattccccatgtatgatgtctgcagatacttcaagaacatcataaacaccactttcaccatcagctgggagcagagtccctccccattcactgtcgccccacgccatagggacttggtgatgtttacagtgtgtccctgtgggcgaacgggataaggaaaagatggtgcacatacaccgtggaatactacgcagccgtaaaaaaagaaccaaatcatgttgtttgcagcaacatggatacagctggaggccattatcctaagtgaattaacacagaaacagaaaaccaaatagtgaatgttttcacatgtaagtagaagctaaacattggattcacatggacaaaaaatagaccagagactaccagtggggggagggtgggatgggaggaagagctgaaaaatgatctgttgggtcccatgctgactacctgggtgatggcttcaatcgtaccccaacctcagcatcacccagtatacccaggtaacctgcacacatacctcctgaatctaaaataaagttgcaatttaaaataaataaaatatcaaatgttttaatattttttaaaagtatgtgtgaacatcccttgacaaattgttttcatccagagaaatttgctgtactgagattatattataacaaagtcttagacaaaaattggttcccatgattttgtccttctcatttggaatgattgcagatcctggccaatttggagcaaggcttagcagaagacggcggcatgagcagcgtgactcaggagggcagacaaggtgggtcggccggactttgctgactagatgcttctcggacatcactgacagactgagcccaaagcctctcgcttcctctccttctcctttcctttctgtagtcagcactgcacgtgtccactcgtgcatttgcaactcactcctttcttggggaagccaagcacatcactgggtgatgctgtgggtgcaacgtgcagcctcagacccgaaccctgcgcccggggagaagacacgccttcaccacaaaagcacacggcccggaacctgccacgctgagtggtctgagtgggcgcgaggaaggagcccagcccagccgaaggggcccagaggggcctctgcgtcggggagagaggcctctgcgtcggggacagaggcctctgcgtcggggacagaggctcgggagggtgcttcaggaggagctggagaggaaggcccagagcctggggcaggctgagggacctgggcagttccctggagcattggaaaccccttgggggactgggtgggttgacatgagctgatctgcacagtgaggccatgccagctgcagctcggggagtgcgttagccaggagcaagcttccgatcatgcttggaaacctggcctgagtgctccctcccaggtagccccaccctagcctcactccctcactccttgtggcagcatctccccacaggcctggtggcctggtcatctcctccttcccacagcttctgtcctactcgatgtgcagcccaagtcaagatcgggtggtctccgtttccgcaggtgtgctggggtttctggggaactgctggctggtgtgagctgaacgtgtgtgaggtgtgtatgtgtgtggtgtgtggatgttgggtgtgcatgctgtggcatgtggtgtgggtgtggtgtgtgcatgtgtgtgcacttgtgcactctcttttcagtaatttaattgcaggtagagtaacaaggtctgaaggagagacggcactgtctgctcatggatgtcccattcagcattcttggcaaccagtcattttacccctggttgggctcctgctttggtgggaatgagcatgtagttatcagagagcagaaggctgttcctggaaatctaacagaaggtcacacccatgagcatttataaggagggtaggggaggatttagagcaggaaaggaatctgcaaagatcatcagaataaatatgcaattcattgagacaatccatattttacatccattaagagaagatattcagaatttcttttcacaaaaataatggtataaggggaacataagcagctaatgtgtttttcattgctgaaaggcaaagtgagttaagtttttaattctagcaattaagtttctgtgtgttctcctgaagcacaccgtaaatgcacatcatttctaggtgattgttatctcacagtggacgcttggtgccagcggtgggtcagcttcagcctcctaaatcacagcctcagaggcagccagggacacacggctcccagtgcccagcgatgagggaggccaggagcactcccagggcctggtgctgcccagggtggcatcttggcactttgcagttggaagtgtggacttttcttcgaggaagtagacacagcacaggcgcaaggagcgctggacaaggggtcagatggaagcgtccctggcctctgtggacctcagcctgcctgtcaataatatgttcatttcagattagctcagtcctcaacctgcgccttcctcctggtcatcccaatgataaacaggcaccattggtcagcccaccctccccccagggcagctcccaggggacctttgcagaccccaagaaggccacaaagccagtttggaaactactagaagagatgggccctgaaggtttgaaatcagtggagggatggctgctaactaaataatgtgcaggggagagcagggagggacgggccaggctcagggtcgcggtcagccaccgtgtggcagcaggtgctagggaaggaagccagctgcaggggagtgccgagtccccagcggaatgtgccagccacttgagttctggaacacggtgtagcactccttgggggaaccggcgtctgcaccagcccatggtcgggaggcaggggaggcctcatggctgggcatgggtggggccctccgggtggcctcccataggtcaactgcgagaggctggcggccaccctggccagtggccctcccagccttgtcgagctgcaggcaatgtcgtcgtttctgtcagctttgctccttttctcagggttctggctttggaaacggggcccccggtcggaccatttggccttgtgtctgggctgatgctgagcagccaccctcctggttctctgatgccgagggtctcttcccaaagccacctctggtcccaatgcgagtgctgtattttctgcctcagtgcagcctgcagcatattcagcattccaggccgaaatccagtggtgttaacaagagggatcttttaaagttaaattagaattcacaggacccagtaattgagggctagaaagagcctcgaatttatttgtgcacttacaggctgctcttaccttgtagcctctatccggctgtggaggtcacgtctgggccgggtgatgtactccatggcaaactgtctgctcctgatgaaggtacgtgggtggccaagcagggctgccatgtgatctggaagagcggggtcagtgggagccgcgagggagccgctggtataatagatgctggcagggaccggccgtgcagagaagccagctaagtactggcttaacagggagcccagtgacacattatggggctatatgtactttatttctactgcaagaaatttcaacagaatgtagaatttagatgatcagatttcattattgaaatgtgggtctaaatgatttaattaaaagtattgttcattttcccccatttttctctgaactccatccccagaaggtgtcctttgttctccctatcttcgtggagggtgtttttttcacctcatggttttgattttatgattgatgcttacaacacctgaagacaggcttccccacaagaccttcttaggacgtcaccccagagctctcagcccgcagggaaacagcttagaaatcaaggagctgaactgaggctgtcatctgtttttccgtgtctcctggctctcgccagcctgtgcaacggtgttttttggctcctctctttgtttggaacgcaccccacacctggctcacctcccacactgggcatcagggtgccctgtgtggagctagtgtccctgcagccagctgtgcgtactgagagctactgcaggaatcagctagcagcaggcgctccggagcagtgcttgtaacacctcctgggctgttcgaagacagcgaccttaactcccacacccatgcggctttcatggggccaaggtcattcctgagcttgattttcagcaaggcagagcaggcaatttaccagcggagaactgtgctcacgggctctgtcatgaaccctgaagtggcagccctgctttatgcacggaccctgcagcatccccagaggtgactgtgaccccgggcactgctccgagcaggctgggtgcgggtatagattcacagccatcagtggctcaggcattccatcaggaagacgtgcagcccgcaccccggctttagcgcagccccagtgcccagtgcggggccgctgcctttgcgcttctgcgtctacgtcaggctggacgcacaaggagactcggcgtcctgttcatcctcggtagcaagcgaccgtgacgcagcctcgcactactgcaagcctcagcctcctccttaaaataagggcatagatctgagatctctgaaatccctcccagctctgacattcacacagctctctcctctccttcaacacactggataaaggaaattacggttttcaagttctgtggttttgctcagagcaggtttttcttccgctgccactcctgagatagtcccactgaggtcaggtggcccgcacaggtgctttgttctggtcctcaccctcctcccacccgcccccttcccttctccagccccctctggcttctgcagcagggcttgcccacctctgagtgggagtgaaaagtaggccctcctgctcccctgccctggtggcctcttcaccacccaaggcttggccagcaaccaggtgaccccgaagcacccggcctgacccctctgcctcccaaaacaggccattctccctgtgctgcctgtggccagccctgacacccccacctggcggtctgggcggtccgcagtaggcctccacctgctgagggcattgtcagcgtcacctgaaagtcaccagcttgccggaacattcttatgcaaagacatgaagaatcaattataaattcacaggactgacgtttcactaatcatggggctaaaactccccagggaggaaagttccctgttccactggcgggctttcatttgcattttaagacacattaatagaaaacgacggaatgggcttttctttgtggcactgtggtagtaacaccaccaccaggctccgaatgtgagtcttcttcctgtattgctgggactcagtacagaacatattattgcatttcaaaaatacttttacaatggacatgatttaatttgaaagttcagcttaagctttcattttcatgagttaaaaaaaggaggcaaaaatgttgcaattaaagccaagccaagcatatgcactctcttgccatctagtgagcatacagggtattgcaacagtgtgtgatcttaataatatggggtatcctgttaattaaattatgtatatgggctaacaatgagttatttaatcagccatttaattatcttgaataacatttttattacagtgaaataaataccaatttaacttcttagcaatgaaatgtattcatacgttttagccctggataaatctgcatgatatgctataatgcacagtggcatgtattataaagcattgaaaatgtcactatcttcactttttaaatacttcttcctctccttaggcctcactgtagccttagggcacctgcactggcagaccatatggatgcaggtgcctgccaccttaggtggcttgggccccccctcccccgggtgcccctgggaggccacttccctcctggtgtccccacagctcgccagtatgcacatcagaacccgccgtggctccgcacatgatggaaaggagcacgcagctgcatcagctaccttccgtcttgctgaaattagactgcagaagtccttgctggttgcagaatggttgtaaatctagtttcacggcctgtaaacacgtgtggctgctgaaaagaaatggtgaagattgagctaaaatagacttgtccctggaagtaagtcattcatgtcctttacaaaagccaaatccacaggatctggagagtaggttaagctctcttgaggagcttcttttggccattttacctgtgaagggctgtttcctcttcagtaaataaagtcattaagtaaccgtcaacctaaggaaactttgtaacacaatcccaaatcctcatctgctgtattgacgatgggccccctgaagtgccccagaattcttcccccaactgcagcccggacacacagacacgtgtcatgttcacacctgagggactggcgagcgctactgttgctgagctggtgggagtggctgccggcgggtgcaggggcccccgagatcccttctctgccgcgcctgcccccggcctggaatccagcttcctctcacacggctcccaggcctgtgcacgtgctctttgggaagagccatgcctaaagtaacttcccatcaaagagcatggcttggtttcgtaaaaacctgtcttttgtcatactagattatcttcagaaacactgacccctggccctgagcactgaaagagcggttagggtgatgcggctggccacggcatcgcccactagcagtgagtgctgcgcccccaccacgcccccaccctgcgctctctgtggtggccgcctcagcctggagcatcagtggcgtgagtggggcactggaatgacccagtgacactgccgggctgataacaagaaagtcaaagcctgccttttgtttacttgaaaccaaaggtgggacatgtgtgggattagaacagacattgcccagcatgatgggtgctcggaagcctacttccttccccagagaagcctaggggggcagctgctacttttccccgagctggtgcaagctggtgagtgcagcctctgttggaaagcagggctgctcccctaaacttctcagatcagggccagcccagggtgtgcaggccccacagctgcatctggggtgccatgtccgtcccagctgcaacctcagccgccccgagtgcccccatgccaggtcacaaagccctcccctgtgtgagggagctcacacacacacgtccacacacacacatgctcacacacacgctcacactcatacacaatgctcacacacgcttacacacacatgctcgcactcgcacagctagacagcagagacaggcagcaggaaggcgtgggaaaggagaccgaggcatgtgctgtctggctcgtcatgggcgtcaggccttgaataaaattagttttaatgagctgtactcgaaggtactagactggagagagtcgttttgggttttttttgttttttccttcctaccaaactggaattgtacttgtctgtctttctttgtaacatcccaattagcaagccagtaactccagtcccagtttggaggaaatggaacatgtagaagaataaagaaataaaagtacctctgggattatacgatgagtaagtaagaagaaaaacaccattggtggccatagttactgctgaccgcgtgcttatagctaagtgcgagaatgcaggggagcatttagtgcagggcctgccgcacacagctcgctcaataaatgcggcgatcactgtcatcctggagagagcccgggtttgctggggacttgagacaagctaccactgtgtcccacgtgactttggcaagaccttcctgcacggagaccgcgttgctcacacctggaaagggtgactgggtccgctcagcgtccagcaagtggctgtgatgggccggcatgagtgggcagatggacagtgagactgtgctgccaggccttgcccttgaggaggggccacgggccagaccaccacaggcagggcagagcgatgaggaatccagcaaaggcctttggcagaaaccagatgccctgagcacggcagctggcacagcgctcctacatgttcccccgtagctgtctctaaaacgggaaggtctcatgcgtgccgcacggagcacacgacattcacgcactctgcaaggccgacctccatcacatactcagcctcagcaaacttgttttgtggtttttctttacatgtaaaggtttgaccttaatttctagcatagaaaacgtttaagagacactttaaaaatttggcctatgtatttggaggatggagatgagacagcgttcgccaactcacatgataactttgtcaggaaagagagttaggtgcagtccaagtgaaatatgaatcgctgtttagaagatggaagcaggaaacagaccctcaggcccaactaaaccgcgacagcccccggtgacaggcaggaccccgccgttgcgatgcgcacagctcagaatcccggcccgactgcagtcgggagagcagccgccccctggcagccgagcaccgcgtgctggtttccagcttccccgccagctcctgcgtcagcgtgtcctctctctacaccgcgtctgtatacacttgtgctcttctacacgtgtgaaacccacagtgctgttctcagctctaaagtacgttgggtttttcttcccacaggattatgtgctggccgtggaggcgtatcattcggttatcaagtattacccagagcaagagccccagctgctcagcggcatcggccggatttccctccaggtacctgtgcacggtcagacatgagccagaaaggccttatgatagttctttgctcagatgggcgactgtttgcttttaatcattttaatataagaaagactgcagaaaatattccaattcaaatgtatgtgaccatgaaaagggtgggttctttccaggagttctggtttgactgtgggaggccctgctggcttttgtgcctgttgctaaatgtgaacccacagaaagtgtcatcgcagccacactgaaatgagttactctagacattgtcctgctgcagttacgaaagcactgactaaaccgtgaggaatctcagttcagcttatcccgtaatagtcactcgctgatattttgcctgaaataacccttgaatcatgtttgctggacagacaaagtccagactgaacagtggtctcagtaatgcacaaagctcggcaggaccccctttgctaagaatgtccttgaagctggaatgcattttcctggaatatttggtgacagggaggtcacagggagtgatgagtcccgcccacatccctgtcaatcccacccttgcaggcggagcacagggcagcttctgcccctctcaccctcagtcttaggtcacgtcccaaacctgggccagggaaaggaggcacgagcaagggacggctgagcagggagaagcagcacagaccttccacaggcacccactcacggtgagccaggccctgcgctgaccatttcacctcacggtgtgactggcttgttttacagatcagcaaactgaggtctcctggttaagtgagatccagctacaggaggccacatagataatggggaagctagaatttgaacagggcctctgtgaactcagggcctgcactctcagctaacagctggtcctctccccctccacacagttgctcacacatgcactgacacacgtaggcacacgtgcacacaccatttcctgcacgccgcctgcttgtggaagtccacatgggacaccagatagtgttggaggacagccctgtccatgggcccctgtggtggggcacagcagatgactgtcactgaataaccccgggcaggcacagatgcgtgacgcgtgagctgccaccatgggcatcggctcctgcctgcactaggatgcttgcagcaaccctcgttacctgtgtgagaaagctctgtgtggccaggatctccaggctgcctcatgtgtaacattatcccctggttatcatagtaaaatagtacgctgggcctgctcagattcctcactaccctggagacaatctcggaaattttatttcagagtcatattttgcacaatttgagaagtagatgctgaattgcttttgcgtctggaagtgcttctccttccagggggagccactggcttgaccacagcgagggctctggcaatgaggctggagtctcaggagggaggctcagcttccacagtgtgatttaagccccatctggcgcacagaatgtgctaaccaggctgcaagggaagccctcggtgttcgcttttctgaggacatggggaggtgatagcggcgctgtgggcaagagcttttgccaaaggagaatggagaaaaagacggaagcacccaggccgactggactcaccgacgccccacacaagtgcctcgatctgcatctcttgcaaattatttatcaggcctcgctcacgggtatttttactgttgctgaagagcaaggtctctgaattctgtttttctaaaggaaatggagattgcaatacctagctatttgggatatctctgaagacgttgtgacgtggctgctacagaacttctcagacagcctcgcgcagctgacgactgcattgccatctgcacatacagaaaacccagccccagtaagttccggcttgggcaggtcagtgtgttgtctgaagatgctggatctgggaagaaggatgaagcaggcaggttttgcccttgaagaacacagccatttgtgggagtcaaggcccgagagcaccgttgtgatcagcaagaacgaccacatatcagcccagtggatgcccgagcacacagcagacccccacccagttctgaaacactcctgggtgcacctggacccgccctctccagacctctcctgtgttgggacctctcctcatctccgctgggttcagcagagggttgcagaggcgggaccctgtgtgtacacgtggtgctgagctgccagagatctcagcacgtccctcgtcccccgtcctgcgcgtagctgccattagccttccgggagtacactccaccctgccgtctctggtcagaggtcctgctagggccttgtggcctgtcaggtgagcccacacttaaagctcacattcagagccctagctaaccttttccagcccagtgttcttcgcctcatgtccttagtcccaccagacagttgatttgctgttgcccaaacgggaccacacttgctgctttgacctctcgtgggctgttcctgctgcttagaactcccttctctttctgcttgtgcaaaccctgcccattcttgagggctcactggaaggacttctctaaagtcaccccagccctctcagcaagctctcccttccctcttccccaaggcatctacgggggataaaagcacagggctcaggagctggggtttggaacaagacagaccccgaccctggcccagctgctcaggctggcgtggctctgagcagtttatctcaccttcatggtgtcagtccccccatacaaccgcctgccgtgagcagtcatcatcgtcgtgtgtagatgataaagtttatccatgtgaaatcctctgtgtcctgcctgggacatgccaggagcgctgtaagcgtaacttgctgtctttcctatgtcttgaggatgggttgtgtttgttccgttcctcacagatccaagtgtaagggcggcattcccaggtctcagcaaaagtacgtgtgctcagaattgcccttggaagccccactcccacggcggggcagccaccccatagagtgactccagtgcacacgtgggcacgaggccctccaggatgggctgtaggaaggggcaaaagccgtgtccccacgcacgtatccggacactcacaccccacgcgccagcctcagagctcctgctggcgcaccctgctcacccccaatgccgcatctcagcacgggatggaggacgccacacggagtcagattgcggtcgatgagaggtcagtggtgcaggacaagatggggttgaacggggactcgagtccagcagaaacgcctgaactaaatgtagacagaattgactgcgctctgttttaaggagaaagaactcaaatggaatgaacacgtaaaagccagcagagagctctgttccgaagggacgtagcgctcaatgcctactttaaactcagagtgttcagccacggttagattcttggagaaacagccctcagagaagtcactttcaagaaagcacgtgtgttttccagctcttgcagtgttcttctccctgaagcacctcatcagtacctgtatcttaattatacggtctctaaactggctgtgtgtgagccattctgaaatgagttggtgccactacggaagcaaagaagtatcacatgcactgtcagcacctgtgtgctgtgctgtcagaggggtaaatttcataagaaatacgtatattagtaactgtccctcaaatggtaaaataatactgcaggtgcttagaaagtacgggacgaggttttggttgcagtcagtggaatccgcagtggctgctataagcagaaaaagtttattcacggacagtagtacagggaatcttcatgagggcccagagacaggccattctagagccacaaagccaggatgccgtagcacgtcacaggcccctccagcaagaatagcactgccagctctgcctggcatctcagagtcttgtccccaccctgcagacccaggtcccccacacggcctcctgcttccgctgcctcctcaggccatgtcaccttatgtgcgtgcatctctctgggggcccaggctgcggggttgcccctcctgcaagagtaggaatgtaggcctcctggttcctccttgaaaggacccctgacaggtgggaaatggacagaatcggggaaggcagggccagcagcagtcatgagcatcccttacaaatcacattgtaacatctgaagtcatgtaacacaaagctaaacacgcgtggaataagattgatttcgtttctctgagattagtttctactcttatgtgcacggagatacaagggaggctcggcattttctacaatcttgaatgttatctccagaccagggaggatttgggtttcatcagcattgaaggtgggagatgaggtgggcatcgcgtcgatgctgagtctcggggagaaagctaggaaatgtccccagcaggtagggaaacgcttggcaaagcacaaaggcagagggacccacatagctgggcccattctgctcacgccctggcactactgcaagaactgtggttttccgggtcaaccctagcgaggagggagcacaagcagagcttctctgcggagaaggcagatttccagctcctaagaacaccctgttccacaaggaagctgacgtgcccctccccagggacccacgccaaaaggccattcttccaggccagcgtcccagggcgctgctgtgcgtggttcgcagccccggcaaacgatggcctgcactgcgtgctgtccgccctgttcctgctggactctctgcactgtgtcctgatcaccctctcagctgatagtgggcactgcagtgtgaatcttctcatggacaacagaccaatcctgcctccaccagtgccgtcgccaaatcagtaacacagagcaacctcaaacatttctgaatgtttaggtcatctaatacttggcaaaagagtgggccgaacacctccaccctcagctttctcttctgtttgtgtgtgagtgtgtgtagcagagtctgagaaagatacatacagccaccttccttttctgagcttgggaaaatttgaacaagagcactgaaatgcaaacactaatcaaaaaggaagtattttccattttaattctaaagagtggaaatagaaaaaaatgattttgctaaaacaaaatatgcagacacctttgggaaaacgtgctataaaggaaccatgctaactccagagatgacccagccggacagaggtgaaaggggtggacggacagcaaggttctagatgattccacacagttgggctgagaacactgtcaccgcacctcctctttgtgtttaaaattttgcattgaatgtaggtgcctctgaaatatgcgagctaaaaataggaagctcactcactgaccacaccaacagttgcccggtcacacgagaagatacactggcgaatacaaggatggcacagatgccctcactttgtgttaggcctccgaggagctgactttcaattttaatatttcaaaacgtattctacttttgaatagcaatccttattctttccaagaaattcatagcataattctgggcactgagcaaagggtcacctgttcggtttgtgtgctgttcacattccagctggaaaccctggctcaaattacagaattgtacttggggtttaatgcctgcatataagggaggatccatctcccccctcggcctcgtcccgcaggcagaactatcatagccacgttccctgccaactgtcagcgcacccgccagacaggtgacagccgtgtttcaaaactcacatgcctgctgtgatcatttccacagtcccttcatcttcatcacacagagcctcctttagagcaccagggcctccacacagcaagggggctgggggttaggaggagagagaatggggcccagtgggaatttccagttctgaaggaaatctgtgttgtaagcgagattgaagacatttgtattccagaggagtttctcacataatctaaattaaggaggggcagaagcaactgatcttcaaacagaagaagcattatattcatacttcttaaaattacttcactccaacttagattccacctcagaatctcttgacttgggtcttagagggtcctcactgggacttgggactgagagggtcctcacttggacttgggtctgagaggatcctcacttggactgggaaagtagctgtggtgcgcaggtgcaagtccagcagccaagcacagacgaggggcctgtgcttggcattggggcagctgagcgcagggtggttctgcagtgtctgtggccagtcctaggcctcggtgtcctggaccaaaggtcagagcccaaggtgatcaggcaggagaaagcctcagccactgcaggagtggtgggaagttgggataaaccagccaccccaggcaggacgaagggggacgggatgcaggaccactcaccgctatggctgagaggacctcagcaagaaccaaggtcacctctgaccgagttcccagagagcaggaacccagggcagggtggggagacgctgaggtggaagaagggaaggaagggccagggaagcgctgtgaagctgggaaagacttgagcacgttttacagaggggcacgaccccaggctccaggaggggtgcgggcaccttgaccgtctcgaccaggagggtggttttacgcacacagccacgtaccagcatccctcaggttgtacgatctgaagacatgcaggttcctgtacatcagccatagctcaacagagaccttcaaatagaaaaagaagagactgacgtctggctgccagcctgagccgtggagtgtgctggctacagtcagggaaagagtggggagagcgtcctccagcccctgccaccctgtgaggcctcatcatgctgatgtgacaccgaagtgcaagcaaaaagaaaatgtaggtaagtgggatttcaccaaaactaaaaactgttgtgctttaaaggacaacataaagaaaaagtaaaaagacaacctatggcatgggagacattgcttgcaaatcccgtatctgataagagacttacatccagaatatatgaagaactcttacagctgctaaattaaaaacgattcatggcactagcatgcagcaggggagagactggactcaactctgacttcacggaggacaggtgggaactgacaaccagggaccagggtcagggtcagcgtccctggttggaaaatcacccagaggaagcatcaagaaggggtttctggccaagcagacttgataggatcgttgctgacagccggccagggtggtaggatctccaggtgctaagacaccgagggcggggacttttcttaaactgacttagcaggattcttgctcacactggattctacaaggacagagaaggaaggcaaggtcaagcttgtctggtagaggaggcttctgcacggatgcagcctaatttatgcattgacagcctgcctggttcccagcaggccctcgggttctgcagagagagcaggtgagggggggtcaggggaaaggagagcacccctggggccggctctgctgtgctcacgccgggacgggaagaggagctggtgaaggagaactcaagaaaaacatggaagagaagctagggtactctgaaatagatcgcatctttcttttattcgtttatgtacattagcctggggggatttgcccagttggaatggaacagtttttctgataagctttaaaatacaagaatgttttataacataaaaatttagactaaagttttccgtgttggtttttgggtagggtttttctggtgggtttttttgtctgtttttgagacgaggcctcgctctgtcacccacactggagtgcagaggcgcaaatgcagctcactgcagccttgacctcctgggctcaagcaatcctcccgcctcagcctcccgagtagctgggaacaggaatgcaccaccatgcccagctaagttttttgtagagagggggtcttgccatgttgcccaggctggtctcaaactcctggcctcaagcaatcctcctgcctctgcctcccaaagtgctgggattacaggcatgagccactgggcccagctgaaatgagttttctgtatcaattgcagacctatgcttctgtgactaaagttgatcagtggtaaatatgaaaagaactgggttttctagctgactacagatttaatatcatctagcaacctatgtggctgttaacatagctgttctgtctttggatggtttaaaatcatctgactcccacaccacagagaagaatcattcttgccttcctctccagtcaacagctcacagccatggactgcaggacactccgccttgagaacactttaaaatggccattgcccatctgtaatggcttccgtgccaccaaggtggtgaggaatcccaaaactgtgacagagaagcaggtgaaggagctgagaactggagctctcccccacccctcagtgcctgtattagttggggctctctagagggacaggactcatagaatagatgaatctatgaaggggagtttattaggagaattgactctcgatcacaaggtgaggtcccacaatagctgaggagcaaggaagccagtccaagtcccagaacctcggcaagtctgctctttccaacttctgcctgctttattctggctgtgatggcagctgaagagatggtgcctacccagattaagggcgggtcggcctcccccagcccactgactcaagtgttcatctcctttggcaacaccctcacagacacacccaggatcaatactttgcatccttcaattaaattgacactcagtattaaccttgacagcgcccaaggaggggagggccagacccagcgcacagttccagtttctgccacggaaacactgaccatgtgttgctcttaaggtcggagctccagggcggcgtttccccgggtttctgcgtttataagtgatgttagtatctggtttgcgtgtgcacaggtgacgtctcaaaaggatatggtggctgttttctgtcttcatataagttagaagcttgctttctctctctctggaaaacttgagtaatgtggaatgatctattccctgaaggtttgagtattcacctaagaattgcctttgctgagcacatgaggtgtgctgtgtgcttttcctaatttattattatgaatctgccttagtgttgtgtgcctgaggatttttctgtgtttctgggaaccattttggtaactgagagttttctagaaagccacctgtttggtccctgttttctcgtggattcgcacagagtaaaagacagtgctcttaccattatttccatttccttgttctgcctgtagctatttctacttttacatttctgtttatgcttcctttttctggattagtttatacactgttttttgtctttttctttgtgagacaggatcttgctctgtctgccaggctggagtgcagtggcacaggtatgattcactgcagaactcctgggctcaagagattcacctgccttagcctctcatgtagctggggaccacagtgcttacggccacacctggtgcttacggccacacctggctaattttcttttcttttttaatggagacaaggtctcactttgttgcccggtctggtcttgaactcctgaaattcagcgatcctcccacctcggcctcccaaagggctgagattacaggtgtgagccaccatgcccagccactgtatttcctttttaatagtgtcttttactgatttgttttctacatattctggaatacttttaattgcatttttatgtttaattttttcagttgctcctaacttttagaaatcggtaggattttgtatcctaattacattttaataattctgaaaatgtcaagttactttctaatcatcaggaaagtcagtgggtagcaaagaatatcccaagatttctctgttatcttcctctgagacattgagtaaagtcccatgccagcctcaggaggccttgcagtgcggaggatcagcacacggtctgggcgttggacagcctgggtgttgaccacagtgttctgtgttagctgtgtgacctcagaaaattgtctcatctttccaagcccgacgacttcatctagaaagcgaagctagcgacagcatctgcatcccaggctgtcgcgagggtcaggcgagctgtgcttgtaagcgcttgccacggccgccggcacacgttaatcttgatcggtcttgatgatgggctgtaatcatcttcagttcagtgtctcacacggtcctgttagacaggagatgcaggcgttcgagctgagggccgcgtcacggagcccatgctgccttcggtttctttttagtccgcaagtgggaaatcgatagtagtggacttcaaacggcttcggactgtgcagacgacgggcagcgatggacagatgccattcagtgtgtggtgtgtgtgcacgcctgtgttttctcttgtttcattctgttttttcttccccctcgtatggtatttcttttgtgggataacagcaacagttgtgaagggcctgagatgttatcctgtttccaagctgtggagttagctgccactttcatggatgctggcaaaaaatgtaagattcctacgttagagaggaaggctatttattacacagcaacagcagtacagccagagtggcattcttcccaccagccacggggccctgattcctcagggtcttcaccgagggcctcatgaggcctgcagtgggctgtgtggctggagaggaatcctgaacttagaacacccaaatccttgctactgggaggcgagcctgcctgccctttgccccagagggatgcagtttagcttacaaggctgtcctctaaacaggcatccttgtgtaaatgctttgaacaaagccctgtcactgtctgtgcttggaagacatgcagaaacatgacacccatggagaaccatctccccaccagtcatctgagaagttagcaggcttgttttaatgctggacagatgcttggcgtggacagtctaagagttaactaggctgctcagtatgatagtgatgggtgccccagccctcctcatggaggtgagccgcgcacattcagcttgtttctcatcgagacagaggacagcattctgttaagtttctgctgctgccatgataacagagctcgctgtcacattctggctcccgcaggctgtgccccggacacaaagcaactctgtctttaccctcgtgagcgcggcttgggccataataggacttttctttcatttgtatctatttcttattgtaagccttagatcatttattcccttccttacacttctagaggtgaaagaaaacccaagtctgcctttgtaaaaccaagctgtggcctcaggagtcagggctggggcactcagccttccaccccccaggcctcctctgccacaggcctgctgcatccggctgcatttcagtcgggcagccggtgggtttcctgacatgcgtgataagagtgggtttgagtttggtttggcttgttttttacagttgaattctatattatttggtcaaaatattactttgcaatttgcaaatgtggtggcacctaccattttactagccacaagtaactcataagttgacttaggacctgctcatattataccaatattttaagtattttatgtttcatcttattagttattcattttattttatctaatgctctgccagaattcattccaaaaggtaaaaattactaaactataagactcttaaataaggcgtgtatattagcaacttagtttctgacatatagaacattaacattccactgtatcttaaatgtcttttgcctttttattaaaaaatgattaaatggttactgaagttttcctctgcctgacatataaatgtcttcatattctaacatgatattagggaactaaatatatgagtatagacttaatatttcttttgtcaactaaactgactaaattttgtcaaagcagattggagacataaaaacagctgaaaagtattttcaagacgttgagaaagtaacacagaaattagatggactacagggtaaaatcatggttttgatgaacaggtaaatattttaaaactaaatatatgttttctcaaatttcccagaggcgttcaagccccacttactgagtcggaaagctccctagagaaggcacttctccctgtatctcctcttgccctgtgtctctcagagcggagacccaaggagtacacaggtgttttcttgaatcgcagtgatgttcttttagtcacagaagctgatttttaaggagctattcccccttgttcttcagagaagcgcttgtattgcccccgttttcagcgtatgtgtgtgtaaaggtcaccattgcttgcgtagcggccgttctggatcctgtgctctggtgttctgtgtctggatcccgtgctctggtgttctgtggtagaacgcacagcgtcgtgcgagtgcacgttcgtgaggaggaaacacgccttggacaaagcctgcagccaggatcagaaagcgtaaataaagcaggtgtccgcttttagcaggaagtcatttaggtgaagttactctatctcaattaacaaaaactagagtggcttggccgggtgcagtggctcatgcctgtaatctcagcactttgggaagctgaggcacgtagatcacttgaggtcaggagtttgaggccagcctggccaacatggtgaaaccccatctctactaaaaatacaaaaaattagccaggcgtggtggcagtcgcctgtaatcccagctacttgggaggctgaggcaggagagttgcttgaatccaggaggcggaggttgcggtgagccgagatcgtgccactgcactacagcctgggcaacgagagcaaaactccatctaaaaaataaaaataaataaaaactagagtggctttaatgtgcgagcctgaatgcaaaacgcagctcaccgcctctacctggagatcaggaaccccgggccacacagggccatacgctgggtctctgtgggatccaaagcccctgtgggttgtgttgggggacagcagctcctgggctttccccgctaactgccaccgttgcttgtgttacagcgcgttccttcacctcgggcagaataactttgcagaagcccacaggttcttcacagagatcttaaggatggatccaagaaacgcagtggtaagatccccaagctgtaggatcctccatcctctgcctttcacagacgctagaaacatacacccacacacgtctcagcaggggcctgcgctctctctctccagtccaccagctccaggcagtggctgtggcccttaggggaagtgacccaacagggccacctaggctctgcccagcagctctgcaccacccccaggcccctaacacggcccagcacgcagcctggaatgggcgggcgtctgtcctggttgtgtgggccaaccctgggcgtgtgctcctccctaggccaacaacaacgctgccgtgtgtctgctctacctgggcaagctcaaggactccctgcggcagctggaggccatggtccagcaggaccccaggcactacctgcacgagagcgtgctcttcaacctgaccaccatgtacgagctggagtcctcacggagcatgcagaagaaacaggccctgctggaggctgttgccggcaaggagggggacagctttaacacacagtgcctcaagctggcctagctgcctccaacacactacgtcagaaggacccgggtctttgaaactgtgtcttgaagctaatgtattaatgtgacatggaggaactcaataaaactcctgcttcactggtgtctgctgcgtgtcttcttggtcccaagccacggcccagcccaggactgccccgcagttggtcggcgttcagccacgcagtccctgcagctgggtcactgttcatgaatgcaaggggcaggcgtgctgggaggacacagctcgtagacaggaaatctggagtcagcctcggggcctctgttctggaggccaatcctgctttgctcgttccttctggacatcctcagagaaaagctgggaggtgtggagaccctctcgccgtgcacctgcacgtacagggagatttacaacagggaagacaccccccacagatcgccgctcatgctcctcttgccctccccacacacccaaaactaagtgcgttggtcttacccatccgagtctcctccagcctgatgccagccaaacgacccctgccagcctggcggtggaggagaggccatcactgtttctcccatagtttatacatccacgtggagagtgagctgagtggaacaggaagcacgacgcataatgaagcacaggaagagcgcgtaaaacgcaggcaggcaggggctgggggtggttttgaagccagacacgtgttttcatgtgttctctcatgcctgaaaggccttttgcccttacgtttacacagttattcctgcttttgaagaacttaaagtacctgaaaatgtcttcactttacgaaagaactctgctaagggttctctaaatatctagctttgtggatagttttaaatataattcattttacagactgtgatataaacatttgcacaaagcgaagccatatttctgttaatttttgtaatagagtagaaacatacaaacactgcatctaccagacagacagtctcagcccatttgctgacatctagattaattatgcattaaaagaaaagaaaaaagaggtgagacagccaaaaggactgttggacaccaaggaggtttcaagatctttctcttcaaaaagagaactgaaactattgttaagcccagaaagatgaagatgtaattagaagccctccaccttgagggtcttccttcaaatgtgacttcagggatgaagtgtaaggctcttcctctgctccaacctggcacctcactgcaggcatcttacaggatttgccagaggattatggagcccgtcctttacaggcccggggctcagagctgtccccggccagttgtgcaggaaagcagacagcagtgcccaggctccagctagacatgagcccggcaaatcagaaacagagatcaaagttccctagtaagctggtaagcctaaatccaccctccctcccaagccccacccccatgctgctggcatgaggccaggccaggtgacagtatcattgcctcgtttcttgcctggattatttcttcctggttttgttttgttttgttttgtttttgagacaggatcttactctgtcatccatccaggctgaagtgcagtggtgcaaacatggttcactccagcctcaacctcctgggatcaaacgattccccactctcagcctcctgagtagctaggaccacaagtgtgctccaccacgcccagattttttttatttttataaagatgggatctcactatgttgcccaggccagtccctaactcctggcctcaagtgatcctcccacctcggcctcccaaagtgctggggttacaggtgtgagccatggtgtccagctaatttttttttcctactgcctgtatgattgcagaattttttgttttgttttgctagaagaggaaaacggtgctgtgagtgtctataacgtctgggacaattgtagcttatctagtttacacttagcttttctttatgttaaaaataaattatacatcccagaaatcttttctagagccaagtgaagtgaatggctaaccatcagaaagcttattttctaactggaaaatgggaactcgctgagttgatgatgggctcacaactgtggaaatgcccaccctggaatgcacagtggagaatgaagaagccagtaaccctgatggcatcgttaccgaatggccagggtgtgccaggcggcaagggtggatttgctccctgaatgatccatccagctgaatcttgagtcattccgcgtttgccacgaggggcagtgttagatcagtggtcctcaaagtggggtccccgaagcagcagcaccaggttctcctgggaacttgacggaaatgcacatcctcagccacatcctctgatcacagaggagtcaactgctggggcctgggctgggccggcccgacagtgtcgtctgcaccgccctccaggagcttctggtgctcctgcaggtgtgagaacgcatgtcagacgccggaggccacagacagaattccagttacacagcaggcgttggagcccatgggcatcgccatcctgccttacactgctggcctcttctatgccccctcgaggattgtgcccccacttgttctctctgcctggacccctcctggcatgcaccttcctagtccctattcagtgtcaccccctgaagcctgccctcaaccccaggacagtgcagccccgtccacactccccttacctcttgtcctggacccacacaggctccgcagcacctgctcctggcacggccccacagttgcagtacttgggctggagctgccgccatgaggtcctccttcaaacacccagttccagcgttccccgggaagcttcccatgccatcttgtcacgtcttgcacccagcaccgagggtgaggcccggcaaagcagagctgcaggggctcagctgtgtacaccacagttcttgagacgcccacctgtgtgtcctccccgatccgctccacaggtccaggcccaggcccagaggtagcccctgcgttcccgtggcttcaggcacacgtgtgcagacatgacgccgagaacaccggctttgccaccaaggacagaagacagtctgccccacccggggtcacctgcaggtcctgctctgaccagggtccaggccctgattccagggatgcgacagcacccagaatgtcctgccttgtgtggcacgtgggaccggggactcgggccccagggctcccaaccctggctgtggagagtgggtggctccgctgctggtcgggggcactgtgtgggcagacagcgtgccagtggccacaggatgtcctgacagcagaggcgctaaacactccaggagcgcctcagccccaagctctggttccaccccttgcgggtgagggaggcccaataacagccagactccatcagttcagaggcaggggctagagatggatttaattcaacttaaaaagaaatacaagaatggaccttttctgcagtcctgagggagtggacaggttgcgtgcgtgctctgacggtgggatccagaccccctcctctcctgcgttgaaggtgccaccgggcctcatccccagccacatcacatcctgagcctcttacaggcaggccccgaggtcctttcacctttctcttctctccagtgcttggtgcattttcaaactcagtacctttcttttgaataaatgagcaagaataaacccggtgctgcttgccgagctcctctccctgggcggggaactaaagcaaaaccacgctggatggggtcccaaacaccctaagaaggccgagctcctgccgctctccagcacgcgcaccgaagaccggagggagggcctgtcgctctcctgcaggagcacgagtggagggagggcctgcggcgctccagcaggagcatgaggagtggagggagggcctgtcactctccagcacgcacaccgaggagtggagggagagcctgtcgctctccagcagaagcaccaaggattggagggagggcctgtcgctctccagcaggagcacgaggagtggactgccggcccgtcactctccagcacgtgcaccacggagtggagagagagcctgtcactccagaaggagcaccaggagtggactgcggacccgtcactatccagcacgtgcaccaaggagtggagggagggccccttgctctccagcaaaagcaccaaggatcggaagtagggcctgtcgctctccagcacgtcccccccccggcagtggagggagggcccgtcgctctccagcatgagcacccagagatggaggaagggtcagccatttgtcaggctctgcgtgtgaaaagctgtgatttcatttcttatcagttattactgtcactatcactcaggatgaaattggcctcacccgctcaggagcaatgctgccttctccctgtcctcctcctggattgttgaggaaaaagccagactaacctgttccacaccttggcatcagttgcataaatgctatctcagcatgttctagaacacagtactgtttaaacaacgttctgggggtaaccaagtttataacttgcagacccgatggccgtaaagcatggggggtgggggggtgcctgcctgcattgcagctgtcagagctgcacagagcctgcgacacccagccatggcttctgcccaccaggccacgtccctccgctcctctgaatccttccagttcttcttaggccacttaaacgccaccgtctccacgaagtcctgtcggatcaccctcataggaagtgacaaaccacgttttgaacccctctccccacccagcaagcccctagcccgcgagcataggatttcctttctagaacacgtgttctgtgaagggccagaggcaatatttgaggcctcgtgggccacatgctgtccctgttgcatatccttttttttgtttggtttggtaaactgcttaagctggcagaacaacagaacccgcacattctccacgcagcccagcgcccttggccatgcagggctgtgccttctgccagctctggaggcccaggggctggcatgggcctcccgtcctgagccccccatgtacattgcacccatactgggaacgcccccaggatctgctgcgagacccccaaggaccagcttctgcagtcctggaagggctctcctgacccccaagtccgccatcttctgatggtggcaggtgggcacagtcactggctgagcgaccaagggtcagtgagattactaggccggcgctgcacccaactgaaatgaactcacgtgtcctcacaactcctagcagcagatgctgtcggcctcgcatcctacaggaaaggaaccatcgccaaaagacgctgaggaacatcccgagggtcacagggacagtgcagagccaggaccagcccggcccatggtcccccagcgtgcaccacctggcccggcactgtgtgctcagccatgaggactgggaagagtcctgcccacagctcaagtgtctacaccgcactgccatccaggctgtgagccgctgctgagcatggggaatgtggctgctgcagagacgttatgaaacacttctaaaagaatgtaaaagatctcattaataattttgagtacctgttaaaatgatagtaattttggatctagtagattaaataaaacatattattaaaattaagatgacctttgaacatttttaacgtggctactagaaaactttaagttacgtatgtggcgcccatttgtggctcccattctgtttctgttggatggtgccaaagaaaccaacacgtaaaagcccctgcagaggagccgctgctttgccaatggttagtggtcagtgtgggttctgccctctgggttcctggcaaccagggctgctctctgagggctgaggttgccacgggctaggcagatactggccctgcagccctcactctccggagggcgtggggcatgggatgggatgtttcagaggacgtggggcatgatgggacgggaagtttcagtgggtgtggggcatgatgggacggggtgttccggagggcgtggggcatgatgggacgggatgtttactctgctccatggccttacagtgttaagtgtaagtcagcattgaaagcagttttccctggaacatagaattctagttgatgcggatccagaaccacggagggtcctacaactgctaggctgaaggctgacttaccaaaggccacagagcatctctcccccagcaggttcctgtggcacttgcatgtgtgtctttttctttttcccccaaataattttccagttttattcttttcctttgacatagaagaacacaattaccgagagaagaaaaggaaggtgagggtgactgcgcgcctccccatccccacccccattcccacacggctcatttcaactctgggagggtttacaggtaagaatgtgaaaatcagaaacgtcaggtaacttttccaaggacccacagtttaaagcgggagagagggagggattccaatccaaatctaacagtgaggctcatggtggtgccacgatctgtgttgccgtttcacacactgcatattgctttgcagtggagagctgaatccacaggcagggccggacccaccaatgggctgccgtggataggctttgggctccagcaccacacacatggccacacgcttacacatacaacacacacatgcactcacacacggaggaccgtgttcacctgcgtctaggtcctttccgcctcgaggtttacctttattggacctggaacccgattacgggcagtctgttcccgcgtcgcccaccctcgtccgtgggagaagtgccatctccgggaccgtgttaggcgtccagcacagccagccaggctctccagcctcactccctccaccccagggccccgaggctctgcccaccgagatgacaccctgcgacctccaccctggctccttctggtcaccctgacacccactcctcaaatgcccacagtgagcctggggtcctgctgcctgtggagtggacccagtgcgtctccctaaagcctccagctggcttggcctttgtctcagcctccacctgcttcccggggtcagggaaccctgccagctccctgggcgtgctgagctggacagtcagcgaactgcatccctgaaccctcgcccactgctccaggaaactcacccaccctcagggctgctggaattcacatccgatgggtggagtttattctctgcaccccagggccccccacacatgtcaggaggaagagctgccctggcaccatgggtagactgcagggagaccccaggatgcggggaaaccccaggatatggggagaccccaggatgcggggagaccccaggatgtggggagaccccaggctgtgagaaggccccaggctgcagggagaccccaggatatgggagaccccaggatgcgggaagaccccagcatatgagaaggccccaggctgcagggagaccccaggatatggggagaagccagactgcagggagaccccaggatgcaggggagactccaggctgtgagaaggctccaagctatgggaagacaccaggctgtggggagaagccagactgcagggacacgccaggatatggggagagacctggctatggggagagcctgggcaacagggagaggccaggctgtggggaaacccccagatggggacagaggccaggctgtgaatgggaaactgcgtctgtttcctgaggctgccgtaagacactcctaagtatgagagcacagacctgattccctccccattatggaggctgccgtcagcaggccattcctagagaggctccttcctctcctcttccggcctctgggggctcccggtgcccttggcttgtggccacatcactccggtctctcctctggtcacacagcctcctccgtgtgccaaatcttttgcggagccacttaagatggtatttggggcccacggtaatccagaataatcttctcatctcaagatccttaagctaattacatctgcaaaagccctttttccaaaacaggtcacgtgcacaggtcccagggcttaggatggggccgtgaccttgggaatgatcagcggccaaccacaaacgcccactgagtagcttcctggggctgctgtaacaaggtgcccaaacagagcagcttaaaatagaactgcatcttctcacagtttagggggctggaaggctgcacgcgagctgcaggctggctgcattctctggaggctctgcagtggcgtctgtcccaggcctctctccgtggtggccatggcagtcctcggtgctcctggctttcggccacatggccccagtctctgcctttgtgtttatgtggcctcctccagtgtctctgtcttctgttcctgcagagacaacagtctttggagctagggcccaccctagtccaggatgattccatctcaaacccctatttaattacatctgcaaagaccatttccaaaaaggtcacattccgaggttccgagcagacaggaacttttagtggacgttattcgagcccctccacctcacagacaggctctggtggactcctcacctcaaccctgctccaagggtacatgatgtccccctttacagacagggagactgaggcacagcttgaagaacctgcccacggccacacagctactgcagcagcagaactggggtgattccatctgagccttcatccatgcagacacctccaagcccaaggcatccacggagggcttctccctcgtcttctccacaccccaagctcacagggatgtttctctgtggaggtggagcaggcaatgctgccctggggcctctatcctgggatctctggggccagcttcaatgtcatcatgggtggccgctggcccaaagtcctgctcagcagcagcagcagcaggacaggcctctggagagcatgcctctgtctctggccctgccagtggcgtccttgtgtccttggggaccccacacacacacattcttctgcagaggcaatcaataaagccggggcaccaaggaggcttcaggagtgattagcaatggagcaggctggaaaatacgccgacgctagggcagatcgtattgattccattgacttgccctttgccaggctgttgtatttataactcagatgaaatcctatttggattttagaatgggtgggtttataactcagatgaaatcctatttggattttagaatgggtgggtttataactcagatgaaatcctatttggattttagaatgggtgggtttttttgaacagttggtgcaaaataaacacaagcatttttaacatggacaatgaaacacattaaactataataataaaggcaggcaggcaagcacgtccatgggaaagtggtttcagtcgaaaagtaagctccaccccagaactgtcacacctgcactgctcacgccagggacagaccgtgataggagcacagcctcctgtcctccagcccccgcccagcccagcttccccagccccgctgacctgggggctgtcttcatgcctggatgcttctagtgccctgcccccgccacgtttaagagaatgttttgaaaaataatcacttcccaaggcagaaaacagagagcaaaacacagagcgattcagaagagccgcctgctcaggggtgccccggatgttatctgcaacctggcacggcccgactgcaggcctcagccctgtgccctggccccacctgagcaattcctctgccctcttcagggcccagccaggtggtcacagcaaatctggtcaggaccagggacaatcagcccgcagggacgtcctgcctcagccatccacttgatggtgacgactgccccgacccctctctctcagcagctgtgcctgcctggagcccccgtaccctcacccggccgtaagggctgctgcaccctctgctctcctcactggactgtggcgtcctgaggaacccaccagccactttcttatgcatctcggcactcaggggacaaaaccagctctcccggaggggcttgtgggaccgagtttcactgagagacatggtgaatggaagaacttcacgcatcatagcaggcagaggactccgggagcccttgacccgacccacaggtcatcttaccagtactag

SEQ ID NO: 291 - DNA, 2536 bp, Homo sapiens
cgaaccccatttccggcctgggggcagggcctcgggttcctgcatcgggcctgagcagaactaggcgcgccgcggcccggcacgcgcaggcgtacagagctgcccgggggtgccagttcctctccgattcccggcttctgtcaccttcctcacggaccttggtcacggccgcaggtgaccccttagcccagctccagtgggcgggtggcagggtcatggaggacgctggcggcggcgaggagaccccggccccggaggccccgcacccccctcagctcgcgcctccggaggagcaggggttgctcttccaggaggaaaccatcgatcttggcggagatgagtttggatccgaagagaacgagaccgcatcggaaggctcgagtcctctcgcggacaagctgaacgaacacatgatggagagcgtcctcatctctgactcccccaacagcgagggcgacgcgggcgacctgggccgagtgcgggacgaagctgagcccggaggggaaggcgacccaggcccggagcccgcgggcaccccgagtcccagcggcgaggccgacggcgactgtgcccccgaggacgcggcacccagtagcggaggggccccgaggcaggacgcggcccgcgaggtcccaggcagcgaagctgcgcgcccggagcaggagcctcccgttgcggagccggtcccggtgtgcaccatcttcagccagcgcgcgcccccagcctccggggacggcttcgagccgcagatggtgaagtcgcccagcttcggtggcgccagcgaggcctcggccaggacaccgccccaggtcgtgcagcccagccccagcctcagcacgttcttcggagacacggccgccagccactccttggcctcggacttcttcgactccttcactacctccgccttcatttccgtcagcaatcccggcgcgggctccccggcccccgccagcccgcctcccctcgctgtgcccgggaccgaggggcgccccgaacccgtggccatgcgagggccccaggcagctgcgcccccggcgtcgccagagcctttcgcgcacatccaggcagtgtttgcagggagtgacgacccctttgccaccgccctgagcatgggcgagatggaccggaggaacgacgcctggcttcccggcgaggctacgcgtggagtcctgcgggccgtggccacccagcagcgcggcgccgtgttcgtggacaaggagaacctcaccatgccgggcctcaggttcgacaacatccagggagatgcagttaaagacttgatgcttcgctttctgggtgaaaaagctgcagcaaagagacaagtcctaaatgccgactcagtggaacaatcttttgttggattgaaacagctaatcagctgcagaaactggagggcagcagtggacctgtgcggacgtctcctcacagcccacggccagggctacggcaagagcgggctgctcaccagccacacgacagattcactgcagctctggtttgtcaggctggcactactagtgaagttgggccttttccagaatgctgagatggaatttgaacccttcggaaatcttgatcagccagatctttattacgagtactacccgcacgtgtaccctgggcgcaggggctccatggtccccttctcgatgcgcatcttgcacgcggagcttcagcagtacctggggaacccacaggagtcgctggatagactgcacaaggtgaagactgtctgcagcaagatcctggccaatttggagcaaggcttagcagaagacggcggcatgagcagcgtgactcaggagggcagacaagcctctatccggctgtggaggtcacgtctgggccgggtgatgtactccatggcaaactgtctgctcctgatgaaggattatgtgctggccgtggaggcgtatcattcggttatcaagtattacccagagcaagagccccagctgctcagcggcatcggccggatttccctccagattggagacataaaaacagctgaaaagtattttcaagacgttgagaaagtaacacagaaattagatggactacagggtaaaatcatggttttgatgaacagcgcgttccttcacctcgggcagaataactttgcagaagcccacaggttcttcacagagatcttaaggatggatccaagaaacgcagtggccaacaacaacgctgccgtgtgtctgctctacctgggcaagctcaaggactccctgcggcagctggaggccatggtccagcaggaccccaggcactacctgcacgagagcgtgctcttcaacctgaccaccatgtacgagctggagtcctcacggagcatgcagaagaaacaggccctgctggaggctgttgccggcaaggagggggacagctttaacacacagtgcctcaagctggcctagctgcctccaacacactacgtcagaaggacccgggtctttgaaactgtgtcttgaagctaatgtattaatgtgacatggaggaactcaataaaactcctgcttcactggtgtct

SEQ ID NO: 292 - protein, 469 aa, Homo sapiens
MRGPQAAAPPDEPFAHIQAVFAGSDDPFATALSMGEMDRRNDAWLPGEATRGVLRAVATQQRGAVFVDKENLTMPGLRFDNIQGDAVKDLMLRFLGEKAAAKRQVLNADSVEQSFVGLKQLISCRNWRAAVDLCGRLLTAHGQGYGKSGLLTSHTTDSLQLWFVRLALLVKLGLFQNAEMEFEPFGNLDQPDLYYEYYPHVYPGRRGSMVPFSMRILHAELQQYLGNPQESLDRLHKVKTVCSKILANLEQGLAEDGGMSSVTQEGRQASIRLWRSRLGRVMYSMANCLLLMKDYVLAVEAYHSVIKYYPEQEPQLLSGIGRISLQIGDIKTAEKYFQDVEKVTQKLDGLQGKIMVLMNSAFLHLGQNNFAEAHRFFTEILRMDPRNAVANNNAAVCLLYLGKLKDSLRQLEAMVQQDPRHYLHESVLFNLTTMYELESSRSMQKKQALLEAVAGKEGDSFNTQCLKLA

SEQ ID NO: 293 - DNA, 107330 bp, Mus musculus
  misc_feature (1)...(107330): n = A,T,C or G
ttcacacactgcaaaggaaagtttcatttgacagtttgtgctactaggaaaatcaaagttccttcttagggttcttagtcatgttaattaaagacaaaaactgagaatagagacagaaaaaaaaacacacaactccaggacaattttattagtgtttagaataaaaactttagggcagtcaacctataaatcttggcagggagatggagataagggaaatggagaaggagagaaaaccatgttatttagaagtatctaaatgatgaacaggcagctaaggggctgaggggctcagagaaggtgacaccactaatctgtaaatgacctccagtgattccagcttccttagacaacccaacattctcagccacttaactcagtttaagagaagcaggatttggagagaaagaaggaatgcattccagcttgccttgaaaatgctgattgatatgacagaatgtctgagttagaagtgggcagaattccaccaatttaggtatgaaatattcaattagcttttcatttactattatgaactggatgacatccattcccctaagtggaaaaggacatcactgtgtcaaaacccatagaatacttttagaagcagaaaaaaaaagtaataataaatgtggtgccactgacaaatgattggtcacttttcctcattttttccttcctttatttttctttattattattttcaatgaattgttttatttttttgaattccaaatgttgctttcctcctctgtcactacaggagtaggtgcatcttcttccactgagaccagtcaagacagtcctctgctacttatgtgccaggggcttgggaccagcccggtatgctctttggttggtagcttagtctcagggagctctcaggggtccagattagttgatattgttggttttcctatggggttgccatcctcttcagttccttcagtccttcccctaactcttctgtaggggactctaacctcagtccaatagttgactgtatctgcatctatctgtctcagtcagctgctagtagagcctctcacaggacaccatgctaggctccttcctatctgcaagcatgacatagcattggtaatagcgtcaaggtttagtgcttcttcccaacccccatgggatggattcccagttgcaccagtcactggaccgcctttcctttagtctctgctccatttttgtccctgcatttcttttagaccagaacaattctaggtcaaaaattttgactgtgggttggtgacccccatccttccactgaggacactgtctatctcctagaggtggtttcttcaggttccatctccctactgttgggcatttcacctaaggtcgccctcattgacgcctggtagcctttcatagtcacttttcttatgagaacaataaagactcctggtgtagtgatgatttggctatcttttcctagtaagcttacatcttagaacaacttgggctttggtgaagtgatgatgggcttcatcaaaaatgagccccactgccgcttagctctgttgtctgtccctcaacaggaaaatctgactgagctcgagaagttcccctgagaggcctctttctgttttatgtctcttttcttactttaggatcctgacttggtggtatataccacagtaagtaatgtagacaccagaaggtgcttcaggattcttgagtcaaagtaatatgataataatgaaagtagactggtttacatgtctacacttcacactagcttagaactcaagagtacataatacatgcttttcaggtgcaggcaatttgagaattaataacagattatttttgaccagggattcagttaaaagattcgccagaactcactggtctacaaagtgagttccaggactatacagactacagccagggctatacagagaaaccctgtttcgaaaagccaaaaataaaaaaaaatttaaaaaaatgagagaatatttattgcattgataatgctgataacaaacaaggtaagtgaatgatattttttgttttgtaagattgacatgcaagaaatatcccacattatttcaggaaagaacaagagctattcatagctacttaataaacgttgtggctttttcctccaatttaactgataacactattagtttaacagtaacctagggtagggtggggtatgactattatctcagcactcaggaggtggaagcagaagttcaaagccagtttctattacataaagatttcagtataagtttgggctaaatcatgaaagtccttttcacaaaataaaatgaataaaagaaagatagtgagagagaaagacagagacaggattggaggagggatagggggacagggagacaaggaagaggagggagaaggagatagatatgactagatgtcaataaaaatggattgatgctgcatgcatgctcagaaaaaatacctatgttttaacttgaaatgcaaatacctgaagcaatgagattcttgcttgaagacctttgtgataatattgccttcctttattagtgcaaaaggtgtcacaagtgtcacacataaattttccctaggaaagataagaatccattcataaacaacccttttctaggtaaaagatgttgctcccaattatatatgataaaccaatgaacactgatatttgatatcatcatagcaaagagaacaagaccctgagttttatttagagtgtgtcacacagatacaaggaagatttgtagctttctttgatgtgctcacatgaaatgcctgtagtcaaacggctatttttaagcttgagaagaaactcaggacaaaaggaacattttaaatataaaagggaattcaggaagatcacaaagaagtaaaatcactattacaaagttcaaagccacattgttcttcaaatatcaagacgctgacttaaatatcattggtgacccttattcaagggagaatttctagagtttaaggaagtgatggacacatggccactctttggccccttttagaaactgcttggttttggaacactattatgtttcttgcaaccaagtctcctgttgtgtcagacttttgaactcagaaaggagatctgaactgcaagataatgggtaggctgtgacaggcatcaagtcagctgactaccaaagacagggagaggactctgaagggtcagtcctctgtctgagcagcagacaatcccttgttagagctttagagaccaagggttggcccctgtatggatgggagccagaactttgctttaattcggaaaggaagtccgggtacttcttgtgtcagggattgtcctacaagctctccataagattgtatgggcagatcttaattaaacttgcccagagaagggatctctgttctatggttagaaaaccctctaaatgtacatggatgagaacttgtgctacagtcctattctggtaagccattcagtttgttggtttatttcctcctagcagaaacgtcagaaaataatatgtatatgcaatatgcaagtgtggaaattgactctcagagagaaacaatatggcctatgttgggatgttgggctacacttccttccaatctcttctttctgaattctgtttttctagtgctctggtgtagtgtgtgcttgtgcttgtgtgtgtgcttgtgcttgtgtgtgtgcttgcttgtgtgtgtgcttgcttgtgtgtgtgcttccgcatgggtgactttctttcccccccacaactgatgtgctcagcaaagtcatttatcaggaatataaaaaaaatcactggactgcttttatggcatttcaagaaagtctattacaagcctttcatttaataaataagaaatcaaaagaagtactagctcaactgggattctgagtcatcttcagacactttcttgttacacatgtcaatatcacatgcctggaagtcacagagaatgtgccagaaaaagaagatcaactggtatatttgaaaaatagtttgacttctgtgtcactttaaaatctttatttaaaattattagagcaaagttgtatttcccagctttattgaagtaagatttaaaaatacaaaaagatgcatttaatgtccataatgaatcttacttccaatgttacagttgaaacctggaatttcatatatattacacaaatacctcccccaaggcatattcccaacctgagtaccttcgtcctctcttcctcctcctttttcctcttctccactttttattttattatattttttccttctgtgtagccctgattatcccatgaaacttcttcacatttcccttttgagttcctgccctgacttcctttatggtggactgtgattgtggtaggaagacataagacaaataaatgttttcgtcctcacgttgcttttacaaagtttgcttgcttgaacttatttacctttatcagtgttttgtctgcatttgagtgcatctaccacctgcatgctcggtagccgctggccctctgcccccaggcattggattccgtggaaatggagttacagacagttgtgaccagccacgtgggtgagaagaggaaacagactacctaggtctcagcaacaatgagccatccctccagtccctacccctacctcctaaaccacaccaagttgctttaggtcatggcctttttcccaacaatagaaagtaaactagtagaggctggtctactttggaggaagccattcagaaacatgccatttttatcaactcattcacctgacaatcttcacaaaaccacctattaggtctgtcactaagaacactagagctctgaagagtttatcagcgggtagccggtgaccaactttaacacagagcacagagctcagagaaatacctcttagaaagcaaagagtgtggatctccctagtgttcccatggaactcagaactagacctagaaaaaaaaatatctgagaatatgtgtactgtacatagatacatctgtctttactcacaccctctttgctgtcaaaaacaaaatagaaagtaccatagactgtgtttcctggtttgttttctttgctagttcttttagaaaaaagtcacaaagacaagagcaaatagagacatgcacagacagagagaaattcatgggtggcacatcaaagtcagtaaagaaatatgggagattatggaaacaagagaaatagaaattgaaaaaaaaatgcacaaagacaaagctgagagcccatgtccctacacaaggaatgagaaccccttctaacaacacttcctgctggcaagtttcttcccaaactagattttctctgttggaagacaaaagaatttgccatatgggagttcggcccagtggtaccagattcttccatttttgtaggcatacaggtatgggttattgggtataatttgaattttaaatgttttctgtgaatttcccatgaaagtcaatgtgtaggccaaacaaaacatatctgactaacacactgagaacttccccttacactcttcgaagaaattagcccaaggttcagatccctgcaccctagctcaagcccacagaacccaagactgtggacacatctaggagcctgaattttaatgactttattatgtaattttatttgagagccaggaaaatcacatactgggggagggagagatgcataatcacatttgaatttcaaagcattatacttcattaaatccaccgctttgtggatgggattatattacatccagagttttttgacttacatgtactactgtggcttttgtggaatttttcaggtcaggattattggctccaactttatggtttaatagatagttcatagttttaggaccagggggtaatgagcacttacctttaaaatgttccactaagtaccagtttaagatgcagtatatgtgacttccttcacactatccaatttctgggcattagaaactattttctgacttcatggttgacagactttcagtaggtgacagcagtggctgcagaaggttgtcttctcctgcatctttctctaacagtcttaatcctcacccttcatccccaagtcccttgtcaaggacatcctcctaaggttatcagctatctttcagcatgcagaggagatgctgtgttttttccttctgtgatttttcacattgttcactatcctatataatggtatatgttatcctgacctatttgatgtggtcccatgtaaaaactaggccatcaataattcacttatatattctttttataaaatgaatttaaagaactgctggtttgcttaataataataatacaattttgagaaaatttcattttactttaatcatatttataattttatttcacttattattttttctacctcagaggtgtgtgtgtgtgtgtgtgtgtgtttctgtatacttggcaggaacttgctgcatagactaggctagcctcaaatctgaggcctttctcctgcctctgcctcctaagttctgaaattaaggcataggcactttgcctgcgattattttttctagtttaatttacctgaaaatttattagaatacacgtcttatttaggcataaatataatttttaattaattattttatttataccccaaatgtttcccccctttcctggtccccccttccagagttcttcatctcattcgccctccccttagcctctgagaaggtgctcctccctccctctcccacactaccctccccagtatttccctcccctgtgtgcttcaagctttgcctgctatattaagcactttttaaaaagtagatccgcgagagtttgtatttttttctcaaaccacttttagaaatccaattacttagcatgcattttcaacgccatacatcaactgcagacaaaccactaatgtatattattttatttcataaaatagttgcaaaggaactataaagctttaaatagttttatatgcaagatagaaaactttccaaactttaaaaacaacaacaacaaaaaagggactggtttgtgtgtgtgtgtgtgtgtgtgtgtgtgtgtgtgtgtgtgtgttgttctctcaagactcaaggctcttatttcaaaacccagatgggatttcaaaatacgagtaaataaatgtcaaagcctcttggcctctgcactgctatcctatgtctgaaatcttgccaaaatgaaattttccattcaagaaggactggaatgtactaaactgatttaaaagacattcttaaaaagtggtggaaactttgtgcaacttctgcgcacctcttcttgcgcatgcagctgcttcagtggtcggacatttctaagaagcgtaacacaactgaaaattaaattctcaacgctttccttaccttctgctactgtattattcttctcctcggtgccaagggtagaccataactaggcattaggctagaagctagtatttcactaagaagccaggagcaaggatgagtggaaatatctcactgtgaggacagagaaagagaacgggagccaagagaaggggcatgcttcaaatgtccggttgctaaaggctcatacttcgctcaacattttagacttctcagaggagttgtagacaaagggtccttagtcacataagaacttaactttcaattactgtgggagtcaaatagttaacaggtagggggtccatctgaagaactgcaaaggagaaatgtggagagtctgcagcatgatagaccatcctaaaagaagaggcttgtctagagatgatggacttcgggacctagaaatcggcaatgtgtgaaaacgtgcactaaaagaagctggggagaaaatgacacggggataaatccaaagtagaaatgacagctgctgagaggagaccgctgaatagtttctacacagtgagacagcttacacatttacacaaccacgtgctgaagagcaaggaaaagttactagtcctttctcagctttctttccactctcaattccctccttttcaggattttttcttagtcagggcaccccgggattatacaatgtgagagttccattagcctagacttacttcctctctctctattgctcttcgatagaaaggtacttcccctcctctacggtcattggtaccaagtgtgcagaggcggaaagccaaaacagaaacacacagacacctgcgcgcacctgcaaaacaacaacaacaacaacaacaacaaaaacttttgtggtttgaggaacttgggcctttgttatgtattttttttctccttgatccgccacgcccccaaccacgtgacccagagagattgggattttgtgaatggagccgaaaggtggagtgggggggggggggaatgggcaacgccccctgctcgaaagcatccaatccgctggcggagcgctgcggggtcagcaataaacaacaatggactggaaatccacggttcctcattggcttcagggacaagctcccggggcctttcgagaagctccgccctctcccggttgctctggatacctgtcccgctctggcctcacagaaaggctttggaaactgttaccgccttgtctggggtttgcagactggcgggttacccacgctgtgctcccctcttcgggttgcaccctcacaaagtctagtagcgttcgaacgcacccctcgcccgggctctgatactgtcctctctcaaagaggacgcgcgcggcgccctgactaggcttggggcaagcattgtgtgtgccctggaagactacacttttcccttggtgaagcgcagagtggttttgtcataaactacgctctttctcggcgggtccggagtaccaggcgcgcacgctcccattttgatgtttccaccatgttccatttaagggaagaaactttcaaatagaaattgagaactgcagcacattgctcaacggggctaaacagctgctggaaaagtcctttagtccccagctctggtccccgccagggtctcaagtgacttttagcaccgtaaagccccggccccactcctccctggcttccaattcttggtagggcagcggctgcaaaggggacacatcagaactaagctctgtgggcaggcagcttcagagagattctcgcttccaaaggtcccatcattgtccttgtaacccgagccctccctgctcttcccccacttcttggtggaggaagtgaaatcttcaagtacagtaagtgacaccctccgcctctctgtatacataacaaaagctccggaaacggcggggacgggggaggggtgcgggaggggggcatctgaactaccaagtcctcccccacccctctgtggccactggaggtttttttccctctcagcactctccaggatgaatctgatttttatactttcctcgcccactctgctacgtactcctccggatcctctcttccagcgccacctctccttagaagcagcttctcccgcttgctttccttacaatattttcatgtccaacggacgaaaggagatcatttttgttgaagatgtattaaaaaaaatcttataagccctattacagtgttgaaaatggagaaaaaaaatagcttggaccgaaagcttctgaggagcaaggctggagcgtgtggtgggtggactccgggtcaaaggtagagaaaagggattgtggacactcgatctgtaccccaacctctacgacagtgctttaaggacataataatggaccaaacaacgctaggaatgagaactggttgactcgatacactaggtttcagtatccctccggttttaacaaaaacagcgagttaggaaggaagtagtttccctcggtggcttttcctgggtgcggaccctgcgacttctcccagagtggtcgcaaaggcataggggcgcaggagacccaagggaaggggccgaaagctgcctgattgacagcccgaaatctgatcttgtgaaagagacgtggagccaatgggaggcagcgatccatcagtttggattggaggcccctggaggagaagtagaggaaaaaccaccgaattcagctctgtcagaggcgctttcggcttccaaggggaagtgctgggcaataattaatgtttttattaaatttggagggaattttttgcagccgttcgcctagcgtggccttcaggtgggtatttccaacaactttttatgtctctccagataattgcatggttgtgggttgcaaaaactattcttatgaaagaggtagctccgtctctttagtcccgttaggtgaaaagcaagtctcgttgatcgccattgctagttttgcccacgtttgcgaatcagagccgcctggggtacactgaccgagcagggagcatccagagtgtaaataaatacattgcctcttgttaggatttttgatacgaccgaaagtatgtaaattgtgaactctcttggctctctttggatccaggtgaagaaggcggcgtaggggagggttatttttgtgaatggggctgtcgagggtaattagctatgcaaatgcaagagcttcattcatgattttttttttttttaagcctaaaagccatcttgttcccctctaggttgatagaagtccagatcccgaggaaatctccagctaaatgctcaaaatataaaacactgagctaatatttgcgaagaggagcagaatggatggattttatgaccagcaagtgccttacgtggtcaccaacgtgagtgatcagttcgaaagttgctgtttataaacttgacttggacgggggtggggagagcgagagatgcgaagggagggggcagggggttgggactgcagacactttatctgctttgttgccactgtagggcgactctgcttctagaagccctatctacaaaatgagcttacctttgagtgattcggataaggcatagttttgttttaagacctcttcttctggttaatatgtccacgatgagtgcaagaggagacggagggcagcaacagctgcactcaaagtttgtggctgggtttatctgccacattgaaaagaacgaagttgagacaaatgctgacaattttgtgtttacatggggtgtcttggggggggtcttccccctcccctctcattttctcacttttcccagttttcctttggcttctcttattacgggtgggggtgctgtctgagagaatggaattcgctgttttaatctggagttgattcagaaaaaaaaaaaaagaaagaaaagaaaaacattaagcgttttagcttaatgttttgatgctgagattacatgtaactagaatgaggataagcaggagtgttaggacatgctctgggaagcaactctccctcctcactgcctgccgaactctcagcctgagcctccactgtcaaagtcagacaatatgtgttggagttctcctgtgaactttttcttttctactcagagagaggatccagtaggcttaagttatgtatgcattttttttaaacgtgtgacatctgaggtttatattcttttaaaggattttatctttccctttgtagagtcagcgtgggagaaactgtaccgagaaaccaacaaatgtcaggaaaagaaaattcattaacagagatctggctcatgattcagaaggtgaggtttgattctgagctgaacgcctcttttttcactgatactttttcccctccaaagggggacatcttaatctcatcgaaaaaatagtagacattgaaatatggactgaaacatgcaaccactcacacagtgagtttgccttggagactattttatggtcttgtcacaaaagtaatgagaggaaaataaacacgtagcagtgaccttcttattttaaacagtattttgtgttccttcttgtccatttgtcagataattccctgtactgagataacaatttcaaactgtaacaccctgggataaagtaagcagccatgcctgctgcttacatttttctttcaactttattacaagttaaacaatataaatgaagccatatattattgttgaaattttatgagtttgatgactgcattttgaagtcataacatttgttgataggccgtaacatgttcactagatcaaacttaaggcttattgaatacttataatattatttagtaaattaggctgtagattcttcttataaactgttggtaggaggtcaatatactatgaattatttcagccctgtggggccactcattatgatttgaagaaacttagacttaattactaaagttcacattgaatttaaaattaaatggactgaattataaaacttcatgaaattttcattctcattagacacttttcttcctaccccccaccctcaccccaagtgaggtggcagaatataatttggaattaataataaaccaaagcaggacactaatgtctttgacgtttacagatcggctaaaaaaatttttttttcttgaaagcttgtatttgaagttgcaccctgtgttagtgttgagctatttggctggaaaaggtaacttgggaattaactcaagttctgttggtattttgtacataaaattcaagtgtaaatgtcctgtctttctaatatctaccccacttctattttagtaagagttaaacactcttaggaagggtttctgtacttagaccatcttagtgaatttcagttttttttttttctttttctgagcttacttcttagttattttgaaaaagaaaaaaaaagataaaagaaggtaatttgatttagttgcctaaatataatattatttagttgcctaaagaaatctcttaaagtgtctcttaattgatgtcataagcaagcaggatttattgagatacttgggatatgaatcctatgttcagttgacactccctaaattaaaatcatattgaatggcagtgtcatgacaaacattttcatgtgatgaagcctacagactgttgagtctcatgttggtgtgtctgacttgctttttagaactctttcaagatctgagtcagttacaagaaacatggcttgctgaaggtaagaggcaaaactgtctttaagggggaaaagcaagtctagaagggggtggagagagtcctgaacttgctgtcttaaatgttcaacccaattaattgagctctaaaagagccacctcatgtgtcatgcatacattagagcctctgatgagtttgtctttggggactctggggctgcactacccagtgtcatcacaaattaccaggagaaattgcttgcagctcacaatcacatctgcttttggcaagaactaatgcaccaagacttcaggttctaagcctctgctcagattttaattgcaattgatcaggtttatattattgtacctcaagagacctcaagccagaactggctggcttgctgtttccctcagagcagcgcatgtgattgtttggttctctgctgactgacttttctgatggcagaaattagtttctctcggctcatcaggacgggatgcttcaagatttaagtgcaggcgtcttcttccctccttgttcacaacacagaacattaggtgtgtatgtctcagttaagaaatctgcaggtttaaaataaacctcttacggggattcagagggttttaaaaatgtttcatgtgtcatgatgcatgtaatgtttgttgaagtttgacttttgatgtcttgtgacttttattaggatttgatatggagacatttaataatattttgggtttttaaaaaattttatgctgcagcctataatatctcttattgtgtgcaactttgtttataggaacaatgagatgaggcttcagtaaagcgtgacccattctgatatgcttaaggtgtttattggctatttactatttaaattttccttctggatatttgtgaaatattttataacctctgtgtgtgtgtgtgtgtgtgtgtgtgtgtgtgtgtgtgctcgagtgtgtaggggaatgagaaagttgctgatatttaaacattcagtatgttttgttatttgcatacttactgtggggactctaattctggtaatagattttcaagatggttcaaaggaaagggagggtctccagatggatttctgagcgtctctaggtgctttgaggtagactgaggagtttttagtctggatcttgtactcagttgcttaagttgctgttagcatgtaaacaagtttctttgtcttgcttataattctagttcttcagaaggcttttacaaccttaaaggattcaaaatcatttaagttaaatagcttttaattatcctttgaaagggggttgcatttatatgttaatgaatggtaagtattagtgaaagttttatttaaatttaaggtaatgtttgcttgtctctaaatgaaacttactgcaataggattacttagcattaagatataaactatatattcagataactttctgtaaaaattggcagaggttctgatgttaacttttatcttttttgttgtgttttattttgatttggttcggttttttgtcattgttattgttggttttgttgtttgtttgtttttggtttttttttgccaagttgcaggctatgtggcattttgtttatttaagaatttactcgcttaaccaaaataagttactatactcacctaattgctgtggaaggcttactggtcctaaagatgtttaaatttgaaaactgaatccaaatgagtgcactggttggcagattttggatgtgcataacagctgtttctggaattttaaaatgtggatctctggcagacttttatcatttttagtacattttctttcttttatttttttactttgcacttgccttacttgtgtcttatggctcagataggagaattggataatgtatctgaattgagtttatcatttaaaacagcatggaatattcttatctcttcattacctgcaaaccaacgctgaaggcttatctttatataaaataaacctagataaggactaatgtatttgaagtaacatgcttttacttagacaagaattcataagattaattaaatacagggattagtcttgagggtttttctttactggataccaggtgtactatttacaagctgcattttaggataatgtaaacattttcaaaatcgctacatgaatttatatagttatgatgcaagtaaaatttattaatgcagtttttaaaatctagtagtaagaagggttttttaatgttagtggactagacatttagttttggtccttagcaattaaatataattattgtgtacatatattctaatttggcttatcctctgacttgactaatattagctaagcaattggaaaaattggttaatttgtcactagttttgttcatttgtgttcttctggacaggcagaaattaatagattactaagccagcagacgataaactgttacatatttctcttcttaatgctcgatagccaagaaagcatgggattttaagacattttgatctctttaaaaaaagatcactgacaattaaccaagtttctcccttgagttcgaatccctctaggaagccaacaggtccaaaaatgtttttagacagaagaatcaagtttgctacagtgtgtcatatgataatcacattgaaaacatttcccaaagtccctaaatagaaatgatgcttcttagaatttttaatgttttttttttttttttgcttgcaagaattttctataaaccatacccagtacaacacattgattacatatgagtaaatggttgtgtatcctgaaatgtattttatttcggaatggcagttgaggtagtacaggcaggactgttggagggtaaggttagagttcatacagtcgcctctaaaaatataattgcattttccctgcaactttatctccatacagagatctaaaacatgtctgtacaatgtaacttcacattagaagtactttctaagcaataatactgcaattttcaggcttgtaacaaatataccacaacttaaaataatcacttcctgagggaaattataaagctcatgttctcaatgaccacaacaccagataaaaggaatagagactctgcttattttaaatgttgccatagttacttcatattgaacttcaccatggacaattctttatcgattctcagtcctttcacttagatcgctactgacaggccattggaattatttgatcccttgaaataacttgttcaaatgtcacttgtattagcattgtagcaattttgtgttcttaacttgttttgaaagctgtagtaagttaagtagtgtctaaaacttgtgtgtatgtgtgtgtgggggggcagaaatagaaaccatggcacttttctaaacatatccaattgttgcttacctaataacacaacatataggaaaataatatgttgcagtttatatcacatgtgaaacagaactacttttgttttattttgttgtggtctgggtgtcctgaggtcctctgttatgaatgagattgcggagaacgtccccagtggtgattcagtggcattcagtgacaccttgaagccaagttgcaggatgcagccacagctatgtatactgttggagttttaatatcaggaataaggttctacatcaaatgtcactattatctcatacaaagattgcctttcggttttatgaatttgtcaaataatactcatggtgatctagagatagaaacattagtaggttttcctcggtttgcttctgatacagcatttacacccaaactatatttttatgatagttactgggaaggtgagctgttttcgttctttacatgtggcctccactgcacacagtgctcaggagcctagtttttattgttcaaatatcctactttaaaaggaagatagacaacagcactggccttagatttgcttttctttctttttcttatttggctcactatttaaaactatagtactttgtgtggttcaatgaaacaggatctgataattgagcattaaggatgaacatgtaggtccttggaactgggtagtagatgattcttggtgtgtgtgtgtgtgtgtgtctgtgcatgtgtgtgggtatgtagtgtgtgcctgtgtgtgtgcctgtgtgtgtggtggtggtgtggtatgctgtaaagagttgtagctactaccatcctttttggttttttctttgttgcaccggaaacctctgtaagatgtgaaagaactctcatgttttagtagtggtaggtcaaacaaatggaacaagtgtgttttatggctaaatatcttatggaaaaatgtaagtgtggctcatctatgatctacttacaaagaaaaaattccttttaaatagaaaaattcgattgagtggggtatagtgccattttcttttttcagaaagtgctggactgtgttgctgaaatgttgctgaacttttccagttgagttacaaagactgtgtaatatcttgcacgttatactgtaactttctttgatttatgtacaacttggtaattaaaaaataataaaaataatgatagaggcagacctttgtagcactaaaggaaaaaagagtttggttggctagagagctagacggcttcctttttaagttttcaagtcactgcaggtcaggctagttcgaaattgaagctgttttgagaccttctcttcctgctttgagtgcacatgcagagtgtgtcaagcattaaaggactctctgtctagggaagtcccccttccctttctgcttaaatatgtttatatttctgcactaattaatgcttttactttgcaaccattttaatgtgaaaaccggatgtggtctataaaaccaggcttagtggactcatgattattttgttccatggactgaagcctcattttaggattagaaggggtaccaccgcgcaaatgtcgattttcttctttatttacttaaaataaatcgcaaattccttcaggtaaattcgttcctaaactttgatccgaacgctatgaacctccacagtgatctcttacattcttatggctcaaaatctgaatgataggcaaggaggaaaggccatttatttatttgattactcgtatttattttcctccagggaatcagggcttcccacatgctcatcaagggctctgtactttagtggccctttcttctcccccctttctttcccctcccccctgcttgctcttctttctcccttctttctgttcacctttccttatttttcttgcactttcctaagttttgtacatccatgtttttggaacagggtgcccataaactatgatggatttaatatgtgtgtatccatctctttccttctctccctcccatattcctctctttatgtatacgcgtgtgtcatttatatgaacgtgcttctcagtggatctgtttgagaaagagcagtaaacttggcgtgtttaccctgcaagttcggcctccttgcttcagttctctggaagggtgtgacatgaaaagattgcggttgggccacatggttcatgctggactgtgtttttgtgaatggaggcagaaatccagttctgcctgcttgtcttgaggaaatgctgaggagatcagctgtctcattcacgggcagaaagtatgagtcatacatcttccgccttgtttggctccaggtcattgttacagtggatagaactggttttaattaaatattaacccctttaatacttgacatttgtttcatttgtaattttcccactcctcccccgcttggctttaaaagaaaattcaacagacagctagctagcttgcaagaagaagagggtttttctttgcctgtagctaaattggaaaattttttttaaatgttccccatttcttaaatggcgaatactattttatttgaacgttgaaaatcagtgtagggcagaagcaagctgtatgtaaaactgctcttccccagggctccggtgcttaagaacacgtattaaagttgaaaaatggggcatcgattctgtgacattttggttgcgattgatacttttatgaatttctttcccagagtgcagctatgtcgcatcaggcaaagcattagagagcagctttggagaggaagctagataaagccaatagcctagagtttatacagtgtccttttaaagcaaggctttggagacgcaatgacaactggcctattaatgtgcaacgagctgatagagctgcttcagcctttaccaataaaatcgacatgctcactcttcatggaagtcttttatcggtccttggtacatattttctccccttcgccattcttcctctttttcctctttcattacattgtgtatagaaacattttcactccccaaagacgatcacctcaagcagagcttagagtagtagaccgtaatgcaatacaaacatttagaaagttttaggttggcttctattactaatttttaactttgggcttggtatggcttgcaacagtatttcaggcagctgtagtttacttcttcatagaattcttgtgaattaaagaaaaaaatgtaggatacaagtgtggggatctgtgtcatattttccttgcccaaatccaacttgtgttttgagttaaatggtttccttctcctccagcttcaagttcgaggtagacttgagcctttgtcaatttaaatagagcactgcttcgctcagtctattcagtttcttaagattagcttctgtgaaaatgtgagtcatatgttttttgttaagattctgtaatatgttcaagcataagtgtgaagtacttattcagtatgttaaggagttagaacagaaatagcactcttcgtccttactccttttacaaattgttagtagggagctattttctccgtactgatgaggtacaccttctagatttctctgcccattagatgttttccctcaccccacacatatgccaacgcccaacacatgtcgcacacccactggagcctttcttgccgctactcatgtggcgatgtgttctatggagctgcaactctggcttacgagactgaggaaaagtctttccaaaagcgtatctataccagcatattaagttgcagataactcactacctatttttaaccatttgtataaacaagcattatattatcattagattatttaaattatgttttattattttattgcatttgtctgctttgtgctaccacactggaaggcaagttcattttaaatataaaattatcttattattttgtatgtataggtacttaggctgaatatttatctgtgaaccatgggtctgcctaattccctcaaatatcagatcccttggaactaggtttagagatgatgtaagccagcaggtggggtgctaggaattgaacctgggtcctctggaagcatagccagtgctcttcatccctgagccatctctccagccccaaatgttggcttgtcaaaagcatattttgcacctcaatatttatatctgtttagcttttttgtttttgttttgttttgttgttgttactttgtgtagatcctagttatcttggaattcactctgtagacaaagatggccccaaactcagaaacccacctgcctctgcctctcaagtgctggaacaaaagtgggtgccatcaaacctgccctgtatctcttcagattttaatttagaaggaaaactacaagaaggacatatgtttttaaagttcaagatttaattatttacttgttattattaaatatgtatcaaacacctaattattttaggtgtatacacgtattataaagtacatttcttctgtgtgtaacatcattcggagcagaaagtcaagcctaccccaacgtccaaactatgttgtcagtagcaaaaatacaatgtaaacaactaagaggatgctagtacacccaccttttttgactccaggcatgtgtgtgtttgttgcttgcttgtttttgagacagggtttctctgtgtagccctggctgttatggaactggctttgtgggccaggctggcctcgaactcagagatccatctgtttctgtcccctgattgctagggttaaaggtgtgtgccattaccacctgcttcatcaagccatgtttgttagaagtgaaaacagacaaacaaacaaacaaacagtcaaacgaaaccacaaaagaaaaacaaaaacctggcctcaaaaacgtttgtaggacatttatgaatgtgacttttcaggaaacagtgtggtagaagattggaaagaagaaagggtctaagaccgaagtgtctgtatcatgtttaaagaactcgatttattggtttcaaaaatcccctcattgcattaaggtgggtgggtcgtggaagtagcattgaaagaaattatagaacttacctataggtggcaagtcatgagtctttgaggtgaaatttatccaatttgaaagttaataaacatagcatcagctactggttgaataagaagaaaaacttgcttcttacacaggctgatcaagcaggtaccagttatgatgggaagttattgctggttaattttcatttggtggtaaggaatggtgtgtcttcaataaagttaagtactgtcataaagtaaattatgtcatatggaattctgttattgtgtggattttttcttaactcacttatcattaacatttcgtcagagagtgatcattgtttttgttggtggtggtatgatttagacagagtctcacattgtagcttaggctggcttggacctcactctgtaccttatgctagatatgtatctcagaatattggtgagcctcagctttccaaatggtagaattatatgcctggctaagactgattattttaattgacatttcccacagagaataagttcattcattcattcattcattcattcaaaaaaagactgtcatctgcttttatatgactttatgggatcaaaatttacagtattatacattaatagtaaagtaatgctatctaatgaggtcacgttgaaagtaaatatgatgatcgttcatttcatgctcagcaagttacaagtaacctgatttctgttatgtgtagtttgtttatacaaaagatacccatatctttgtgcttggaaactcaataataccctccacgataggctatttcaatgtccacagcgaaggtaataaacatttcacggtgcaggaatggacttttgctttaattgccccagatgtatgaagtcctcccgaccagtaccttttctttaataatgaaggacatcatttgaccttagggccagtgaaacggtgagattcttttccttagcacagactgggagccaggaaaacatttttcctgaaaattattatgaagacaattgttaaaatgcattgctttgttgcatgtggctccagtcagtggcaatccttgcattcttgcatttaaaaactttccatcttgctttggacaagtttagggcaaatgtttttaatgttggttgtctgatttgcaggagatggaacctagcaagagaaatcaattctataaatgagaaggtattcatgtgaattcaaatgaagcgggatatcacttgtaaaaaccttgtagatcactgagatggtccgcttaagaacagccctgggtagattgaaatgcctttagtacaactcctgcaaaatgcatctgtgtacgatgtagaaattctgcaccttgtattttccatcccctcggtttccttttggcaggtgaaattcagagggaccacacttactgcgtgatatttcggacacactcaagttttctagttctatcaatgggcctttctgttttctctcctctgccttgatcttttatagagcaggctatattggcaaataagcgtaggtccgagctccatctaaacagaccttgcttgatacatctgattcgattccttatgtcttggcagttccactcttaattttattttttaaatgttctttttcttcttcagctcaggtacctgacaatgatgagcagtttgttccagactatcaggctgaaagttgtaagtacggcatgactcatgtcttgtgttttctttgcctgtcttttttttttttttttttgaatcgttctttctctttggttggtctcctcttctagtgtctgtctttgcattgtcccaggattgtattgggattgccatcatgaagtgttttggtttgtcaggctgtgacatcagcaggatccctgaatgatctgggcaaagtttccagtggcggggcaaggaaagcagacctcttaaaacactggctctgttctccatatctagtgcatttccttggagaggaaacagggtgtgctgcaattgtttattccaactttgccagtgcgttcacaaggaaaagtctggatactgatgggaggcagagtcatgtaagattagttattctataagttgtaaaaagatcttggttcagacattcactggctaattgcatttctctatattcacaaactgtcacctgctttgatttaatatttagcctgacattttcagcttccaggttgcaggagcacatctggaagcagcctttggcttcttacagcatcccttttgtgttcctatccctgagccttgctccagggcctgtcagaatgcaggaagagtgattcatagatacttgccctcccttaattgcagagtgagcattttgcctgcacaaacatagttgccccagggtttactgctgatatttatactttgcaattctagcattaaccgaggctactgacccatgaagtaaatccaaaggagaggcatggttactccctgtcccctggggacctgttccgatagagctggtggattcacatctccatggaccatcttggacctagtattctagaggctcctttttttcattgtacatgcacttctatgaaaaagcttaatttgtaaattagtaagaaactaagagtggtaacaatgaactacaacaatcataacaaaaatgtatcattaaagctatttaaaattagaaattctttctaaaacgttccttttcctatttggcctttgactgcagaaagtgaaactgtctatgggtagaggccatgaggccatgttatgagagctgtctgatgtattatttactttcagtgcaatttcaatcactaacaggttttgtgcgttcagactgttggcagtatcagatgagtccatgtcagcagctacaggaaagtcttactagcctacacctcatgaaagtcatattgtagaccctgggccctcaagctcctatattaatacagtcaggtaacagatgcttgcttccaatgtctgttatctttagcttccaggcatagaaggtccttagaggtttcttaaggataaaagccagttaagagatcaaagaagaaaaggtataaaaacgtgacttccaggtaggctgttttgtcctgacagctggtttgatgctggagttctccccagtttctccagatgtgaagtgactcagtgaagcttcattcatccagcagatgacaggtttataatcaagttcctcatattatagcttgatttttttaaaactcattgtagtaaaatgtagacaaaacaaaccccatcattttaaccagattaagtgtggagttcaatgacactgagtacattctgatttctggactatcaccatgacagttcaatattttcaattatccccaaatcctatacccataatgcaatagcttctgaccccctcagcacctgcaaacattgctttgtcttctttttatctgtactgaaaagagaatctgatatactgtttgatatctgggtacaagtatttcatagatctctcatgaaacatattccggagatttcaaccttaagaactagagaccttctgtgttgtccctgtactcttctggtccctcaatctttctcccaactctttctgtaagactccctgagctccatctaatgtttgggtattggctgctgagtggagcctctcagagaacagttatgctaggttcctgtcttgcaagcataatggggtatcatcaatggtgtcagggattggttcttgcccatctaacctagaccctggggagttcccagaaactgagtaagcaaataaagaccatacacaagctggatccaggcatgcacatatgtagcaggtgagcagcttggtcttcatgtgggtctcccaaacaactggaacaggggctgtccctgagcttgttgcttgcctttctgccagtggattccaggcccctaaagggacaaccttgtctggcctcaatggaagaggatgtgcctactcccacagtgacttgatattatatggggtgagggatggggaatttcacacccagagggaagcttcccattcgcagaagaggtgaatgtgggattgggggaggactgggaagaaaggaaaggctgatattgggttgcaaaaagaatacttaaataaagttaattgaaaaaaaaagaggaaaataaaagagaaagaaccagagacctccaaaactctcataagaacaatcgctaaaggtatctatgcaaggcccactcttactgattgaatcgttggaagagaaaggtcatctttctactatttcctttcctgatttttttttctgcaagttcaacttgtcctccaagtgaatgaatgacatctcattgagtcatttcatgtctatataattgataaggattccagaagtgcagctgtcaggatagaaaacaatacctgaaagtgacttttactgcttttcttgtttgacatctctatcagcatttattcttgagtacttcatccctcacaccctcgtccacagcaatgttgtcttctcccttccttcttttttctcctttgattcttcttcatactccattcactatctgtctattaagcagaagacatgtggtcagggggaccacagaaatgaatttttactttgagttaaattggattactttcacttgagactcatgttggttactattctgagatcatgcagttctcacaagccacacctacaagaccatcattatcaacccagatctctctgctcctggctcctcaacttcacctgatgcccagaagagtccctatgtaagcagcaataggtgacacctctggactcacccaacactttgctgtgtgtaggtgtaaaacactgtttagaccaattgaagctctaagttcacactagaaagaccaattttttttccatattagcagttgttttatttttatttatatttttgagatgggacttagaagtttccaagttgccctaaaattcatgacggtcatggattatcatggatgatcatggataattatgaatgatcatggataatcttgaagttttgattccacactccccccaccccccaccacttcctaaatgctgagattataggcatgtgctgtaaacatatgtgtcttttttggttctgctgttcttttaaatgaagtcattgctgtccaagctttaaaaaaaaatgctgtaccttcagttagctgcaaaaacctgcagttactgtattgttcaactgcctctcagaagcatctcaggttccgaggtctgtttcatccctgttccccgtgttcctgttcctcagtccgctgccaccgagcttcagaataggttttacggttggttttcttgtctgtgatcctttctcctgccagcctgccctttgcatccacacataggtttctggccttgttagtttccgctttgtacatcttgctggacaaagtccttatgctggagcagaacattgttctctaaccaggccttggccttcttttcaacgcagatttgcctctggtgcctccagtacttcttccccgacagatgtctttatatcttagtcttttttacttactttacaattctccaagtgtaacacactttttttttaatgtgttgctttaattgtgttgctttaaatgaatgtacttttgtgagcttttggtggtcttcatattcagttcagatgacatctcagttgcccttcttggcgttctcttgctgcctttgtcttacagatttagtgtacatcatcatatctcttatctattgtattagagaattatagttttgtttattttgtttttttgctttgtttttaaagagacccagtgtcactatacagctttgggctagccaggaactcacaatgtagacctggctatccttaaactcagagagatctgtctgcctctgcattgatcatgcgggcattaaaagtgtgaacacttttaatgagattgtgaacatcttaagagtcaggggcatgtcatatttaatatgcttgccatgttacagctcaccataaataagattataccaatcatctcaattttcctttaaccagcaaatattgacagcttaatggtacctagaaatttattaataaaatatatttataaaagaagcccataaacaaagggtgaatataaatctaaagtggcctaatacaaatcaaggtaaggcatagtttattttaggttttaactgacaaaacaaactttcattcagctgatgctgtccagctaatttcagttggtactaaggggagaataagggaatgatttgaaaagaggaataaagtgtttgggcttagagcgaagagaggacttctagacttcttcataattaagttgtcagatagcaagcagaattgagaggttggacagtctcagaagtgcttttatagatatttgattcttttctgtctggggttgcttagtggggcagaagaaatagagagaaactggtccctcccccatgtggcctatcatatctacatttacctggaacgaacatagataattggattttcttacatacctccatgaaacaagatttttttctgaatttctcttcattgctttagccctttgatagaggaaggttagccaaattaaaagcaaaagtttattcaagactttagtcacactgcagaacactcatgggacaatgccatatttaaatacaaataggtgacagagaaatttcaaaaatttcgaccagagaaaaaaatgataatatttgggactttctaaaatattttctggcttgtcatatttttattgacaacatatttgaatttcaaatctggagcccaatgttacactgttgctggctaatttctgagaaattctaaattttgaaacatagacaccaaaacaagtaaaaaacaaataaatcaattcattacaagaaacaaatggtccaaacacataattttttttgttttgtaccaatacacctttcataacttacaattgtttggaaactacgttaccattttagtatatactttacctttagtgagaaactaagttttcaaaagagggacttaaaatagaatcttaaaacacagatgtatggctagcaagatgtcttggtggatcatggatttttgccaggtctcatgacctagaattccccagatgcacacggtgagaggagagagctctttctcaaaagacctctacatgtactatacatgcaggcacacacacacacacacacacacacacacacacacacacacacacacgtcacaaacatgggcatgcacacatgcacgtgcaatcacatgtatgcacacacatacagagggacagaacagagagagagagaatcagttgaaaaattgcttatctttccaaagtatacataagtttgcatatcagctaactttttataaatacacatgcaaaattatatcaattatctattaactcgtattttcagctcagtcacatcacaatagtcttttaaaatccaccttttctttggttcatcatgtggctgcacattagctccctagcctgtttcttctctagcttacacccatcactgcagtcttttccctgtagggaacgcaggatggtcagcgttcatggttacatctcacattctcccaggatgttcccaggactcccgtgcactctcaaaaggacagaccttgaagctcttctctaccttcttactcctaaagggacagaggaatgtaaggcagttagaagggtgggactggaggaatcatcttggctctgacatgtttatgagaataattactttcaaccacttccctttatctgatatatgtaatagaatacttagggaccatgtacaccaagtcaagaccaaccagtgtgtgaggactcaatgattcaaaagccatcactacatagtgacaccttccagtaaatagaaaccataagagtgggattttctcaggctttttcaaaattcagaacaatactcaccttgaagttttttggaagcagagggggacactctaaaaattactgttagaaatctgcttctttttccgttttgttgtttgtttgtttgtttgtttgttttttgtttttgtttttgtttagagggcagatgctatggcctagactaggggcttgcacactgtttcccatagaactctatcttaggccccttaaatctactttctaataggtcattgcagactctcacggactaatttattctgtgttgatacgattggaatatttcacttacgatttgtatttcttagctttttgcctttttgctaatctacaccttcctacacacacctttgtaaaaagcttaactcttagaattaatcttgacatcttcctttgactaaatttgtgggttggccaagaggatttgggggtctcctttcactgcttttggctgtagagagtcaaaaattacagtttagaccaggtgttttttagtatactattagctctttctatcttttatttcttcctcttctttattctctcttctctctctttctctaaatgattttggtggggagaagcaggattccactgtgtagttggatgagctagaactccctgtgtagggaagcctggtcttgaactcaaagatctccttgcctcagcctctctctctaccttttgagacacccataagcattttgccctagtcagtctcatttccagaatatataagacttcacttgaggtcccatatctgaggtctgagtcctagctatctagaggatctgagatcccatgtctaaggtttgagggtttgagacatagctctctggaggagtcaacctctttggtctttggtttgttgctgttacttggtttgttattgtccttgctctttttgtttttgttttctctttctttctttctttctttctttctttctttctttctttctttctttctttctttctttctttctttttttataattctattgttttactaaagcaacatagataatatataaaaggtgttggatacataaaatcattctctatgcctccaattccttatctcacatccctttgtagaaataaacatgcttttctcccttcctctttgaaattgtatgtatctaggtcttttacctccatggctgtgcactatgtgctcccaaaggctagaaaagagcattggatttcctgggatttgagttacagatatttgttagcagtcattgtgggtgcacaggattgaacctgggtcctttggaataccagtcagtgctcctcactgtctagccatcctttcagttcccttttcgtattttctcttttgctgggaagggtgttctatgctttgcgatagaataatctgctatggttaaggtgtgatggaaggaggagcacggagctgcttgagcaggtgtgagcatgtcgagaaccagcaggatgacaccagctcttgtctaccaagtttttctttccccttttccttctgcatttctttttccatttctccttttttcaagggtttaggacaggatcttccatagcttgtgctggatttgaacttgctatgtagtcaaagatgaccttaaaatcataaaacttctgcctctacttgccaactgctaggatcagagacattaactactatgtccaattcaagattgtatttattgcctgttaagatagacaaaaagaagtgtttcaaagtttgtttttttcttgtaagagataggaaattctagaatggggcctcagaatctccaaggaattgttttgttacttccatggaggcctagcatggagtgtaaggttagatgttttgcctaccctgtcatttgcttactcggagtaaagacagcagcctcagtcttttgcagtgagctaatgatccctgctacaagattatatgtgcatctcgaagttatacgaccaacacagtcagttcctaacattattatctaaatattgtatcatctttttgttatctacacaagactagagaattagaaaatgaagtctgtataagatatttttaaatgtttctctttttgaaatgtttgctttactaaaagtatattttctaatccctaagcatatattttctttatgtggctgtgattttccattttgagagtcattgatgacaccagcatagacccatagactccagcatagagtgctgatcagtgaacgctctatgttacttagagagaagcaaggcagtgctggccccaccctactgtgaggttttctaaccaggattctggtttataaaagagctatctgccttcagtgcaggtgtgtcctgtttgtccctacagagagcctacccgacatacttggaagaaaggctgaagtcttattttggtcattggtggtttcacaagaagtgtattttctaatctaggtagaaaacctaatggtaaatctctaagcacagcatcctgattgatctggatctcctgtgccctttgaaactaagctaggctggtgtgaatagtggtgtgaatagtggtgtgaatagttcttagatgggaaatccaaccacatatacggccttgcaagaattttttcttttaagtgatacttagatgcactgaatccaggagaagaaataacactttccctaccttgagcacgcatttaaacttggtttacttgtggcatgaaatagagttcactgggttcttaggcacaggccacatttctatcctatgacagctttgccacactaaaggacttataaatgcagcagacaaatgtagagaaatgcatgactgaatttaaaagtggatctaaagtggggaatgactattagaaagaattaaactggacatactggtgtatgcctttattcccagaccttgtatttgggagatgaaggtagcaagacagaattctaaggtcatcttcagctatataacaaattcaaagccatactggctacattattcattactatgaagtaagttactagaaactttctttagtcttggttttgatgtattctctagaatgtaacaaacacgtttgattttatcagtttcttttttttactaaggtggataagttagatagaatcccaagattaaaaccaaaacacgaatccagactaagcccctcacagttgaggtttgctttcattacagctaaacattgaaagtgcttcttagctttgtctttcccaatgcactttttctttggtttgtccttgttgcagccccatgccctggaaactgacttctcagacctgttcaaagggaggatggcaacagggcctttccactcttcctgcctataattagcagcacattagtttaagaaaagcaatcagtgccatctttagttgaagttcactcaatattaaataatcatgcttgtattcagagagcgaacttcttagggggaaaacagtctagatggactagaatgtggaaatctcttcgcagaaccaagtgatgtagtttttgctccagagcttaattatgaacagacagtatctgattcagagttatttacagttgtgtgtgacatttattagtatttgaaaattgtttttttacaaaatctgtagttattatgaaatcagatataagttggatgcaaaatagactaatgagtatataagcatatttatgtaattttgtgtgtttgctatttcttagggaattttatttgttgttttgctttttgtttcttgtttttttttgtttgtttatttgtttgttttcttcctatttcacatttactataagaaatacctacttagattcatggcacgtatttgctttagtcagttattgacgtctctactcagatttggtgctgtgtctcactaagtcactaatgtgggcttgatgctgttgctttttagatctaaggacttatactccagcgagtgctatttgcatttgacaatagctggggatattattagttattgattcagtttttcataaaatattgtgtaatggctagagtaaaaaaaaatcctgtttatagaacgtcttgtgaatttttaaacagaaataaatacttcagtgccatgttcttgtatgcaagttttcaaatattattttatttaattgagactgagtctcactctagtcctggctggcctgatacttttgatgtggtccaggctggcctggaatgtgtagagattcacctttctcggattccctgctgggcttaaggtgttaataaaagctaggataaagggattaatgctgctgtgccttgctcaaataacattcaaaaatggaatttaacaaagaatcagttacattctagataacaatccaggtcatttaaagaacatgtggctcatacctgcctagagttatactttgcaataatgttacaaatgagttttgatccggtaggatgttttgaattatgatggcttcttcctgatcgcttaccttacagggaaatttcatatttacatttcatattgctgttgctaccttactgaggattgaatttagggtcttgtgcatgttaggcaaatagttacccatggaactacatacgagaatctaacctatattgagatgataacattcttacatatgtagtccatattcatagtatgacattctgttactttaaaatataaatagtacattttaaaaatgagtaaattccttgttagagtctgatgaagccagtatggctttgaatttgttatttaactgaagatgaccttagaattctgatcttgctgccttcatctccaaaacactagatctgggaataaaggcatacaccaatatgtccactttagttttttctgcaagactctggatttctctgctacctgtgacaagtattctaccatctgagtttatgccttcccatcttgtaaaatttagtgttacttgtattgcataaatctacctgtatcgaggacacgtttgtagaattgtagtcagtacaaatgtacaggaggtttataagattgcaagtttgtttggaaactatgatttgaggtcctgttctgtgcctggcacgtggtggataaaagatctctactatcacaagacaaacttaaatcctcccctacccatttatgttacatcacatgaagggtactgtctatgatgcagaggaactattatgtatttccctttgcatctatcactatgtgcagaaaatatggctaagtctttttttttttaagtttacctttattttcacaaagtaccccttgcacacgggtgtagtcacagggtttcccagccaagagctcagtgtttgtgaccctaactctttgtcttacaccaacaactaccctgtggattttaaaagattatgtcctgcaatttgtagttgctgttttgtttttggggttgtttgttttttagttttgagggttttttgttgttgttgttgttgttgttgttcttcagagctgaggatcaaactggggccttgtgcatgtggcccgattggcaaatatgttaccacggaactacacccggactctgttttaatgttaattattgctgtgtacagaattctgttctccatactttaaggccacgattgttctttaatgtgtatgtgtcatcgcgtggttatagacatcctgattttctccggtttcgattggctccttgtggatggatcatgtcctgttcaccattgtctgaaccatattgtcgtaggtctccactgcatattgaattgaattgaactgaaggactaactgcgtgggtagtgagaattcttttttcatacattcaagtacaggttgccataattgtctgacatctaacccaaatatctgctttatgtttctgtttcatttccctttgagggatcatggagactgcacatttgcaacattagaactagaccctagttattacattagagccctctaataaatattaattgatactcctatctgaaaatacatttctcagcaatgcctattcagtatgaatactgagaaattacttggcattgttcttgttttatttaaagagaaattcagagagcacaagcatgtggtgaacagcgtcatatagctcagctctctgcacccagttgcttaggtaatgcttgtcttccttcttggaccaccagaccttagaccacctacagatatcaaaactatttctaccttgagaagaaaacaaaacaaagcatacatggctacagctatgaaaattgctcaatagtagagtaccatgctcgagtccttgagttttaaatcccagcaaaacacacacacataaacacacacacacacacacacacacacacacacacacacacacacaccatacagacaaacacagacacacacacactaagtaatggttaataatgattgctcatacaggacactgatacttttgaaaaatcttatgaagatctgaagaattaaaagaggcttagagaggacaggaggaatcttctagcaggtgatagtcccttggaacgataccctgggaactcctttggcttaagtttgtaaaggagatgggaaactgggtgtttggaaacagcagcagcagctgtcatctgggaagcgtgtgcttagttttcactgtctcagatttttctcttgtttattcaaaatatggaggacgtacacgaaggctccatgtgtttgcatgctactaaggcagaggtgttggtttctgaagcttaagagatctgtgtgggccatggaaataggagcagcagcagcagaggcactaaagagaatgctagagggcacagccttgagatcccagaatcttggaggctgagtcaagagaaccacaagaacaagactagtctgggttttatagcaagaccctgacagaagcaatcaatgaacagaatcaatatcaggaacttagaaagagagagagagagagggagagggagggagagggagagagagggagagggagagggagagggtgagggctttttctttgttttgtttgttggtttttggggtgttttcgtcgttgccggtttgtccccgtcccccctccggttcggggtttgtccgcccgttcccctcgtcccgcccccccgctccgccggcccgtgttccccggcccggtttctttcttctttccctctttttcttcttttttttcttttttttgtgtggtttttttgttgtgtgtgcggggtggttgttgtttttgctcccttgtttctctttgttcttgtggtggtcttctggttcttgccgcgttctttttttccctccctcgcgcttttgtcggtttttttttgcgcgtggtggctcccttcttccgcccccgcgtccgcgtcgccccctttttccccgcttgttgcccgcgttctgtgttggctcctgtgttccgttggtttcttttttttccgtttttcgtgtccttcgtttgcgtttctcgtgcgtggtcgcctctttgttgttgttctctttcgcttccgccccgcccccgttttctcttgtgtttcggtgcgcgtgttttcccccgcctctttccggtttttgttttttgccttgtgttctcgcccttttgtccgttgttctgttctttaaaaaaaaaaacaacnnnnnnnnnnnnnnnnnnnnaaatcaacaatcctgttggcactcctgatttctagtaagtcagtttttactagagtacagagttcggtttgagatgatattacaagttaacgacagcaatattttacacttaagaatgaaatacgaaatatgtagtccatgagagttcttgcagtctcttggatttttaaaagaagattgtatatggcgggagaagagaaaataaaactgtgaaccaacacacactttcttcaaaattgtttgtgaaattggaatacgatagtgcacattttcttgtttaaaaaaagttgtttttatattctgctgtcttagaagcacaaaatacaatagacgtaaagatgaattgatgcagtatattactatgtccagctctcttttttaaaagatctacttcaattatactatatacacaaataattcttagtttactgctgtttagattattcacattagctgtgatcaagatccataagcccgtgtaaggttctggataaatctggactggatgcacgcatccccttgtcttccctttccgccctgaacttttcaacgctgacatttagtgctgaggtgtaagaggctgttcttcggatttcctctagctgcagacttgccagcaaaagttctgtcaaacactatcaagacctgcggactcacttaaaatgaccccttcctggaagatgtatagataacaacaaagtcaacccttagcactgccccttcccctttgagaccagggtcatgctgtgaagtgaacttttatcactgtttgaggttgtttttctctgtcctcatggacacaacagccttactatgttgattcactatgactttccagtccttggcacagcgcagactgtcaggtgatgtagctgtctcccgtctcaattcacagtcctgaagtgaaaccgaagaacattgttctgttttgctggatatttctgtctgctttcgacttctcctgttgtgttttccagcaggataatcaaaccctgttttcctttcttaaagctctacgttctttcgtccactgttttattgtagattaaaggctggtacattagaaggttatcagttaatcaataagctttagtcatgccatcttgtgatgaagatatccattgatcaaagtggaaatttaggccctgagcttttaaatggcaatttctgaaggttaaaagagtgttcttgtggaatgtacaggcctgtacctgtatttatattcaaatggtaggcatgaatttatgcatatgtataatatacacaaacccatatataaatgacactatctgcatgttccataaaattgtattcacatctctttttgttgaatctttatcagcaactctctccacattgtgtgtgtgtgcacatatgtgtatgtgtgaatgtgcatgtgtgtgtgtgtgtgtgtgtgtgtgtgtgtgtagagcaaaaggaggaagcagaggaggaggaggggaagagagagagagagagagagagagagagagaaagagagaggtcttcatataaagactaattagtattgtaatatcttctaagccccttgtgattacaaaacgggaaaatatgcttttatctatatgatttatatacttaaacgaacatgaatgacaataagaatcatcatcttcattttaaccaaattcagaatgtcctttcgtgacctttatactgtggcttttgtttaaagagaaactacttaagccagtacccttccgcagtgccaggcactgagcacaaggtgctatgagtactgtcctagcgttcaacactgaccttttgcatctcctcagcacccgagatgtcatggagcatcttcacattgcatatctggttatttagccaagtgaccttggtaggtaggtatacttgtcaagactcacactacttcattgtctgtcacagtctcatgacagcatcaagacttattaccccacgctattttcttttctgtacttggaatcagattcctagattggcattcacggagttgttattaatgtttgtttaagtgagtgggacatacgagaggatttcggatacatgcatagatagatgcatgtatatacttaaatgcccatacactgcagtcaagggaatggaaaacaaaaatgcatttttttttatttataggactcttcacgaaagaacaaactaatgcatacgcagaaagcaagggtggagtaaacagcactctatgttccttattaacctatgaaaatctctaccctgtgctttgaattggagagacatggttaagtcctgtgtatgcatgacgtcagcttcaggacttctgaatgtttgcttaacaaaataatgatgctcccaaaagggaattttaaaatttttagtttggaccctgtttatctttgaacaatgtataattaccccaagacatttgttaatacttgccaaaattgattgaatgccacctttgttatcatattttatctgaaactgctttaaaacgttcttttttgttgttgttgttacaaatagtattgatgctatagacaccaaagccataattgctgtggtttcccccagggatttgaatccagtatactgaccctgtacaactgtgttcaaatgtctgtagttgactagatatgtggcttggaatgagcaatttacgatcattgtgggtcaactctcagctgcataaaaaaggactaagtgctaacattggtaggtgactcccatgtaaaatgagaatatatctgtctgtttctataacattgtatgtgtttgtataaaaatctatacatgtttggttcatagaggacaccaaactttaatcctgtataaaaaatatagtgcacaaactatttcaggcatactcttcctattatttaagtgagctcactgtgatcagcttcccaaattatattatatgttttgtttgcttgcttgttgccatgctcaggatttgtgtgtacaactcctagaccttaggacacacctgcaaatactgcatcatggttgccaggagagtgatcctctctgttaagtagttcaatgcatagtcactgtggcactgagaagaaactcagaaagatagtctcaaacctatctacatgctgatcacaggaattcataaatagaatgtccagctagaaccattctgacacttgttacaccgatcccagttattataggacctactaacgtcatacgttttagattattaatactggttgatctaggacccgctaatttgtgagtctagtaaaattgcttacgacttcagtgtttttgttcattttgaagtcgatgtattcattgaaggaaaaatgtgttgttttttttaattaagatgcaacctttataatgcaatgcataataattatagagttcactcagcctgaagaaaaaattttaccagttaaatagtaataatcaagataaagactgcattagaagggtgttaattttatgatcatctcaatttaaataataaaaaatccacaggacttttgctgtgatactatgtcaccaaggctgaactcagttttgcatgcagcctccttgaagcctatttaacaataattggctgctgaaatggatagccaaagatcacccttgtacaatagatacttcctcggctgttaagactcactgtgcttcagaaggacaagatgtgtttgacccaaagtatcagggtgatggctctgagcagaatcctagggaagatcaagaatcacaggaaaacaatttaaaactgacgttcccacagttggagtctgcgtgttgaatatatttgggagtagatgctagcatttcaggactatttagcattgacataggatcttgaaacagctactagcttagactgtgacaaatgtggcagtacatagtgatgcatacatagtacatagtcaaacttagctctggaccaccactgcttcaggcttctaaatgaaaggtcaaagtagctgggtggataggagcagtcaggggctacattttgtcaagggcttagcacctagtctggaaaaactcaggcaccctgtggaaggatgatgcaccagcatttattcaatatgaattcttttgaaggtcagaaaattttataaggtacaataacagcagtgattatttagatagtagtgatatcaatacaacagtcgaaaagaacgcgagatgattgtgtctaactgatgcagcaatcaaagactttgctttgtaatgtcattccagatctacatgtgaggagcatagcttccctaggttggtgtagttctcattagagagctgttcccctcctcctgaaagggaacacgatgtaatcacaagttcactccaaagttatggaagaccctgcttgtttggtttgtgtggcaatgttgtctgcacagggtgttccaagtgttctctttattatattcatggataccaattggataacaacaacaataatgacaacgacaatgtggtttcctcaagcactcactcagcatttttaagccagacttaaatcatcacgttttagaagttatttggttttacatgcatggttagaatccaaaattaaatggttgttcacttatattagaaatagttcatatgtaaaatattgatatacaataaaatattacacacacatatatatgtatacacactcatatatatgtatatatataatatctatggggagagagaaagagagagagaatcttgattcctgctttcagaaggcattccgagaagcttgaaggaagcagggaagtacattgggaatatgtaaacaacaagaaggtaggatatgttcagtgattgatggaattctgccagtcaggctcagtgtgcctcagctttctttttctttggtgggtttgtgtgcatatacatgtgtgggtgtgccagggctcacagatgtgtgcatgtacatgtgtgggtgtgccaggcctcacagatgtgtgcatgtacatgtgtggatgtgccaggcctcacagatgtgtgcatgtacatgtgtgggtgtgccaggcctcacagatgtgtgcatgtacatgtgtgggtgtgccaggcctcacagatgtgtgcatgtacatgtgtgggtgtgccaggcctcacagatgtgtgcatgtacatgtgtgggtgtgccaggcctcacagatgttcagagggagttgtgggagtcagtcctctctttctactgtgttgcttctagagattgaactcatttttcatactcggaagcaaactgagccaccatgcttgcctcccctattctgctataaccttggcaagtcaccagagactttattattagcacaattatgatattcacaataaaaccccagcatagatttatggtgcagaaatcgagatctcttctttgttggatatttattgttatttttttcctattcaaaataccaatataaattggaatagttgagaaaagcctcatagagaaactaaatcatgctcttgaactaccatacaggcttataaaagattagaaatgacaggaaccaggggattgcctacccaagtctatgattgctggacactgagagttcttgcctaggactcactgggtgttagatgttccttaagatagctgatttttcacagtaatctaacttttagtgaaaactgtcatgttcttttttaaatttttatttttttaaataattttaaatatttgaggcagggtttctctgtataaccctagctctcctagaactcattctgtcgaccaggctaccctggaattcagagatccacctgcctctgcctcctgagtgctgggattaaaggtatatgccatcactgtcaggcctttttatttttatttttatttttttgaggaagaaaattatgttacagagaagttatatttgggtccactatggccagctttagatcttcctcaagaatatattcttaaccagagtaaggctgtcaaaactgaggttttttttaaaaacaaaggtgtttgctcaaggcaataagtagtgctaacttgggataggatagaagtagaaattagctcctcttggtatagaattttcaagatatttgtgtttgccactcattttgttcatggagggaagaaggtctttggggtggctgaagaccaggtgttgatgctgccaacaggcaagcctgtttcctgtctttcagagacaatagacactgtgtctgagtacacagacgagcgagcgttagacagtggggagaaggcagatggagattcgtcctttggaatacatcagattgaatgaaatagcaaaagcattatcagatgtagttggaattcatttgatgaacaaatgaacctggaactatctcgagatgaagtttgctgttctgtaccgagaaggagaaagaggagatataaaaccagagagtttcttttcaagtgtactttagcatatcagcacacctgtactcaaaaatacatattaaataattaatatactttgggtattttctaaaaatttttaaaaatctggtgagataatttgaagaaatatgcacttgctaaaattcatgcttgtgtagtaagggaagaggagaagtaggctttatttgacctttcatcccctgcacaccctcaatttacaaagctctatttacttcaaagaggccaggaggagaatgcaaaacagcctattatgtttgtgatcctgggattgttttgctgctggtatccatgggcttttttcaaagcttatcttttctatccttttttaatttgcacacttggaagcagagcagagtgctttttcattttcatattttttgagtttcttgaaactatcagttacaacatggactgtataataaacacccgccccacaccttgtctttacgtgctaatataagatgctggatgtgtcaactctctacagcatttaatgcacctattgggccacttacaccttaagtgacatcaaatgatcctctgaagaatgagattatgattctaggggaaaaacaaaaagggaaatgaagggggaaatccattctatatacaatctcctacatcatgctgtgctggtaaaaaaaaaagaaggctacttgtcactggcgttctctttgattactaaattataggaaaataatgtgcctgtagtcatgatctgtcatagtcattatggtgtctaatttagtatttaagaggcccaagtggttaactttaagtttaagtaggtcaacatagcaataaatacacaattttgacagttttaaaggaggcagctaaccattagaagacctttttgtttagacatgccacttagactttatctaataacaatcacatcttagcattcaaaagttcacaagctattagtaactaatatttatttgagggaaacttgagaaaaggaaatcagacgtagacgctgttttacagttaatgcctctgtacacagaacaacagaaaatcttgccttgtgaaaggattactgctataagtgttttcatgttatcataaaatgggccactcaagagagaagtaaaatatctgtagtatccaaatactcttgtgtctgtggtagggttttccatttttgatagctcctggacatggtggctgccttgctatacattatactccaaagactgtgttcatagttatccaatcaaagtaaaaggatacataatacatgcacacacacacacacacacacacacacacacacacacacacacacactggactcttgccctgacacttttgctatgaagttaaatcgtgtggcaggcgagatgtttctgttcccctcatgtctggctcagttcctcatggttcctattatatggagttgtcctgtcctgcagcctcaagggactcgtgggcagtgtatcaggaaggctccagagtaaaacagcagagcaagaaccccgtagactagcctctgagaaattacattaataaagtataataaaagttgtaaacatcattttctgtacatttttttggaagcatctcttattctataaatagagcaggaatcgagtctctctgtacattcaagtaatgagtgtttggataatacttggctatgtgctctagctactccaacagttacacaagctatcagctaagtcaactactgtaactttgtatacatatatcttactgttaatctctgtaaggtactgaaattagaattaaggaactaaatatccactcacagagtgcttatcagtaactgttcattttcaagattgtgaagttagatagagtgctctcttaagccactcccaaaatactgtaatgtgacctgtttcatttgcaattgtaactcgatgctgggtccactttaaaatgagagatattatatttcagtatcagcttccataggggctaagatgtgttttagctatggaaatgggatctgtgtatttactgattgtttacactctgttcttataaagtttgtaaagtcagattcttatgtaagtatcttaccatggtgtttgctcactgctgatctctctgttatggctaagctcatccaagtctcctgtttggtttcctttattagtgagtttgactgtttgcttcgtgttttatttctatagggtggacttgtcagtagagacaaactgatttggatgtcactcatgtagtagctgtaactatttatcactttaaaaaaaaatgaaaaaatgggcaagggtctgattggctgaagaatgtgcccctcccaatcgtactctattcttatgtacctcatagttctcctttttggggaggtcattctttgagtttgagacatgctcatgctgtagagccatgttgtcctcagacacagagttctgcttcagcttcctgatggagtgtgtgtgtgtgtgtgtgtgtgtgtgtgtgtgtgtgtgtgtgtgtgagagagagagagagagagagagagagagagagagagagagagacccagaagagaccagagagagagagaccagagagagagaggagggagaggcagtgaacaccactttcccagagctaggaagctaagagtgcccttggtttctgttgttgttttgttttattttgtttctttgctctgtcttgtttttgtttttttaaagatttatttaattttattttatgtgtgtgaatacttcccctaaatatatgtgtgttccacatgcaagcttggtatctataaagaccaaaagaaggtatctgagcccctggaattcgagttacagactctcgtgagcaccatgtgtgagatggaaatgaaacccaggtcctctccaagggcagccagtgcttttaactgctaagccatctctatnnnnnnnnnnnnnnnnnnnnnnnnnnnnnnnnnnnnnnnnnnnnnnnnnnnnnnnnnnnnnnnnnnnnnnnnnnnnnnnnnnnnnnnnnnnnnnnnnnnnnnnnnnnnnnnnnnnnnnnnnnnnnnnnnnnnnnnnnnnnnnnnnnnnnnnnnnnnnnnnnnnnnnnnnnnnnnnnnnnnnnnnnnnnnnnnnnnnnnnnnnnnnnnnnnnnnnnnnnnnnnnnnnnnnnnnnnnnnnnnnnnnnnnnnnnnnnnnnnnnnnnnnnnnnnnnnnnnnnnnnnnnnnnnnnnnnnnnnnnnnnnnnnnnnnnnnnnnnnnnnnnnnnnnnnnnnnnnnnnnnnnnnnnnnnnnnnnnnnnnnnnnnnnnnnnnnnnnnnnnnnnnnnnnnnnnnnnnnnnnnnnnnnnnnnnnnnnnnnnnnnnnnnnnnnnnnnnnnnnnnnnnnnnnnnnnnnnnnnnnnnnnnnnnnnnnnnnnnnnnnnnnnnnnnnnnnnnnnnnnnnnnnnnnnnnnnnnnnnnnnnnnnnnnnnnnnnnnnnnnnnnnnnnnnnnnnnnnnnnnnnnnnnnnnnnnnnnnnnnnnnnnnnnnnnnnnnnnnnnnnnnnnnnnnnnnnnnnnnnnnnnnnnnnnnnnnnnnnnnnnnnnnnnnnnnnnnnnnnnnnnnnnnnnnnnnnnnnnnnnnnnnnnnnnnnnnnnnnnnnnnnnnnnnnnnnnnnnnnnnnnnnnnnnnnnnnnnnnnnnnnnnnnnnnnnnnnnnnnnnnnnnnnnnnnnnnnnnnnnnnnnnnnnnnnnnnnnnnnnnnnnnnnnnnnnnnnnnnnnnnnnnnnnnnnnnnnnnnnnnnnnnnnnnnnnnnnnnnnnnnnnnnnnnnnnnnnnnnnnnnnnnnnnnnnnnnnnnnnnnnnnnnnnnnnnnnnnnnnnnnnnnnnnnnnnnnnnnnnnnnnnnnnnnnnnnnnnnnnnnnnnnnnnnnnnnnnnnnnnnnnnnnnnnnnnnnnnnnnnnnnnnnnnnnnnnnnnnnnnnnnnnnnnnnnnnnnnnnnnnnnnnnnnnnnnnnnnnnnnnnnnnnnnnnnnnnnnnnnnnnnnnnnnnnnnnnnnnnnnnnnnnnnnnnnnnnnnnnnnnnnnnnnnnnnnnnnnnnnnnnnnnnnnnnnnnnnnnnnnnnnnnnnnnnnnnnnnnnnnnnnnnnnnnnnnnnnnnnnnnnnnnnnnnnnnnnnnnnnnnnnnnnnnnnnnnnnnnnnnnnnnnnnnnnnnnnnnnnnnnnnnnnnnnnnnnnnnnnnnnnnnnnnnnnnnnnnnnnnnnnnnnnnnnntgtgtgtaagtgtgtgtgtgtgtgtgtgtgtgtgtgtgtgtgtaagtatgtgtgtgtgtgtatgtgtgtgtgtgtatgtatgtgtgtgtgagtgtgtgtgtgtgtgtgtgtgtgtgtgtgtgtgtatgtatgtatgtgtgtgtgggggggaggtatccttgtcctgaatacatgtggatataaaaggacagtctatgtcacttctcttcttctcggtatgagtcttggggattgaactcaatcctcagctttgatgccacaaccatcgtccttagcctgacgacttggtttttttgctttcttatgtttttgttttgttttgttttgtttgttttgattttggtgagtaaaatttacaagtggtggaaatagttggttggtacttatcccacaagaacaagcctgttagtatttggcaggcttttggaacaaatgcaatattattatctcaattttgttttgcatattactatggcccatagttaacgtaattactattaaattttaggttagatttttcttgctaacaggttaattaaaaagagaaatggaagttccatctatcacttattgagtctaagccatacaattttgatgttgccatctgcatttacccttttctttcctgtgtcatatttatttcctctttttttttaaaaaatatttggagcaataaataatgaagaacaaatttatcaaacttttctgaggtatttgttagaggtctgctgtattgtctgctgaggagatcaccctaagatcggctctagatgttggagaaggttcgggtgctccgttctttctgtgatgaggaggttttcacgtttgcatagtggccgagtaagctgtccttggtgtctggattcacaggtccatgtgtttcaagattcctcagaatttctttatgcagaagtgagagataccagcaagtgttggaattttccaggctatacccagctaggaaaaataacttccttcctagtcattcccaaatccctgttacctattgtttgagagaaaccacaaatttcagttcagagaagtaattgctcgttggggggattttgtggatcttaaagattatattaaagcacagaggggcaaattcagtagaagaaggtttcccggttcagaaaggtcattgttaggacttcatttagtaggacatgttcaggggaggtgtagattcagataaattcctcttaggggagtttcatttcgattgattagctctctttctccaatagctgcagcttgttctgttttgttcttggcagttggatgtggagtgttgtatgtttgggctcatggcacagaatttgtttccaaaaaaaggtgtcacgctgttttccatctactggaccagtaggggtaggaagatctgactggaagccaaagtgaaatgcaaaagtgatttgctttggatagttcctccatcaggccctctttttcctgctcctacccttttccagagagaaagaccagcttcctcccaggatacttttgctgccaattagactgggaaggtgaggatcatttagcaccactaagctgaaaagccattatagtaagtttgggcatgaaattcaaaggagtgaatcaacatattgtacgttcagcccattaatgatgcttttaaaattaggaatataacattctgggtttgatactgcttgttttgttattatgataatatctttcttttccatatcaactagaaagtaggtggtccatgccatcaaatttaaatgagatttgaaacaccttttaaaacagcgagtgctttaaaatgtcaaccatattgactgcacagctttctaatgtgcattatgaacactccttgcttaaatacagtacttatacctgatttcatttttttcataatggttaagggtcactgtgaatgtgagttactattatttccatagtgcaaaaatgcccagagtagagttcggtgcctattttcacaatatggtcccagaaaaacataagctccaaagtcttgtatcagattttcataatttttctctaattaatctatttggcagtagctctgctactcatcattattggctgaggaagtccttgaggacatagtccattgacataacatgtatgattagagctgctgagaaagagagagacacagaaagagagagagagagaaagagagagagagaaagagagagagagaaagagagagaggaagagagagaatgagaaaaatatagatgatagatggataaagagatagatgagggatagacagatagatagatagatagatagatagatagatagatagatagatagatagacagatacacagacagattgacagaaaatgtgagcatgtataagtgtgtctacatatggatacattatgactatatgtgttaaataaagggaaaggcagttacatgcttagcagataaacaggtgaagtgagctcagtagagatattgttggagattgggatggtagcaaaagatagtgaggcaaatatgaaaatccaggttttcacaagtaactaaatatatctgaacccagccgaaatgttagcagccttagatagagttcattagatgtcgtgggaaaaatcattttcagtcaagtgagacaagtccacattgcatccccaccagtcactgagcagagggatgatacatgaaaaccccaatcgcagatccatactattctgttaagttgtataccagtgctttgcaatgcacgggaagttgtagtaacaagtctacttttgaggaatggctgtcccaggaggtcacatcttcatcaagaagtccattctgcaatctgtgaggattctgggcttctatttccacattgcattcaggtccctgtgtgtgcacatgtgacgctggatggaggtgtgagttccagggtcacctccaggaccttatcaactgtgtcacctctgtttgcctctgacagaattatttagaaatccttgaaatgaagagcattttcagttactgacaggagtcaccgaagggtcaggtcctatcttcataaatgcatgatttcactaagatgctctgttgacagcaggtatctgatgtgccccaagctggcctgctttacactctggccttcgtcttatcatttctgcaatcaaagggttctgatgattaaaccaacactctcagtctcaaaacttgggccatacataacatcttgacctaaaagaattctgaggttcagaacaatggttgtttctcatgattactaaatatcgtttaagttgtgaaagcatcaaggagcccactacagagtggatctctgaaacaataatatctctgaacattttctggctcttttttttttctttcttataactatttaaggaatcttatttaagaacgaaatggacatcacgtttctgtgctatgatctgaatttctgcctcagagatattatagatgaatatattcgcagagtctgtaaacaatggaaaatcatgaaaaccagaatcagggttcctgcccttaaatgtgtttcagtttgcattttgatagcggtttagaaatgttatcgcttgttttgtcacagacataattcacatctttcttcaggcactgtaaacaagagaaatggtttaatggccccataaaggcactctgctgatagcagagattaggctctttagtaatggatgccagtgtgtgtgtgtgtgtgtgtgtgtgtgtgtgtgtgtgtgtgtgtgtatgtgcacagtgagaggagggagagtttgaagaggcaaatgtactgagaaagaatctctggagaggcttacgagcagcttgaagacccctgagcttccttcctacattgtgaggtgtatttacagaacgcttgacattatcatccttatttgtacatacgccttcccctttgcttctgagatttagctgaggactaattgaggtcatcaccatgcatttatcacctgaacttgaagtgatactaacttaaagggagtgcttcttctactcagtgtactccgaactacatttattttataaaagtctgcatgcatttttcatggcgggcttgtatctgctcttaaataatctaatttatgtataccatttattttttcaccttttacagagttttttttttccttccaaagcacttccatagcccagtattttttttttccataagcattttgatgtctgtaacatgatttgtttttgttttgactgtttttcagttatattttctagacaggtgtaaaagatttctgcatgttatatgtcatcccagactaagtaagtgccttgaaagtcctcacacctcataaatctgtagtgttttagagtatcaattttatgccatttttcatcagcttgtttgtgaattgattactctgggccacacaaagtgttaccagaccacaacaagctgacctttgttgaccaggttgacagtgcacatgagcacatatcgctcggccagcttctttcatgtttgctttctcccttatcactatagaacgtgatctgaagcaaggatctgcaagctgttctctggaaagaatcagatggtaaatgttcaggctttgcaggtccatcattccaactcaggtctgtggctcacactaatcccagaaggccctccagtgcatttataaaaacaagtagtaagttgtaggggtcacaacctgtcctttgaagtcctcatgtgccatactgtagattaccctaaatgtcacgttttggcttggtattattttataatagttcaggggtctcagcaccagtggaggaggctgcactcttggcttggttctctttagaaactgtagatttgcttcaaagacctgtttctcttttgacaagagctaaaaataaaggtttcttctcctagggtaaatactttgtattcctagaaattattattccgtttcactcttagaaaagttaaaaactaagaagagtgaaagcccagagcccagcccacttcctgcttctttacattctctggagatgtctagaagtagacttgtatgttgcttgtgacttttttttttttttttttgtaatcccagggtaaggcaaactcttagtgtgtaagcaccatctttgcttcagtgtaatatgagtagtgtgaaattttaaatgtcttggtcacagtaataaattgaaggaaggcagaatgcctaaaagcaaacacaaatgctctgagaaatttttgcatttagatacaagtgccaagaatatattagtaaggtcatgcatacagctgtgtgtatcacacacacatgaattaatcaaacataaggaatatagaacaggctaaaatctttgctagaggaaatatttttcagaaatctaaataaaactatgattagacctatatttgcacttgatggtatgaagtcatctttttcaacacctgcactccatagctctcagagctccagactaccatttaaggcctagtagatacaaacagggaaggaatgacgggttcaaaaacatctgatgtgattttatacaatgttatagtgtgttctttaacaagaaacatttcaagtgcaaatgtaaacagatttttaattttattgcaaccaaaaacccaagattcatttaaaaatttttgtttgttactatttttaaagtagggtgtcttgtagaccaggctggctttgagggcctggaacttcagatccattcccttccacctccctttgcatgcaataatattaactttttagattagatacattgtactttacatgtggaagtttttgcctctgtgtatgtctgtcaacatataggcttgatgactatgaaggtcagaagaggagactggctcatctgaaactggagctacacatagtcacggaccattgtgtagatgcttggaattgaacttgggtcctctgtaagaacaacaagtgctcttaaccactgagccacctcttcagccccaggctctaattcttaacctgctttaatgttgtctgagatctttatccaggcattctgcttggattctttatgttattttttcaggtctgtgactaaataaccaatagaatgaacttaaaaggtagaaagcttaatttggctaatggcttcagagattttagggggtaggctatacatttttaatctgtagtgcacaatacaacatatcagaagaagttttttatagctgggaaataaaagaggcaccaggaccttgaaatcttcctcccactaggacttattgcctaaagattccctcttcttacaaccatgcctcacactggggaccaagactgacatctgagcatttgagcaacagtcaagtccagccttgaagatcacaaaatactatgtaaatctgagttattttcaaacatagctgcagtttcttattcagattgtaaactcagcctcacaccaaaactccatttgtagatgactgtttagtggatagctgtcacaaacatcttctgttctcagcggaacgttacaaggtaaggccttcttgtcatgactaaggaagtattctcctgagagaatgtaattcattctctcgacctacgagttgttttatgttgtctttctgctcaatcacgagttcacatttaaattaggatccttgcttgtggaaacctaagagcgcctcagtgcttcagtagatttgtgacggaactctttcccttctgaaatgtgggtagaagaggaaaggtactaggccctgtctcatcattcacgctcttcaatgaaaacaatcaccgaatgtctatgcagttaaccatgaatgccataaccacttcttgcaaaccctcgggttaggaagtggttaaatttatttttgaaagtgcatatttttaagtcctgatattttggagctcttaaatttaaccgttagacaaactcagtcatcattagtcagccgtacgacgtgtttttaaaggtcaagcttccatcaaggcatagaatgcaaagcccatctcttgagtgttctatctacttctccctagaaaagctgatagctgtgtggttgtaaaagtttgcatgggaaccctcggaccctgtttgaggaatgcctgagatgaactctaaatttcatacttagataaacgatccgaactctatgaagtcaggaataaagtatcatttggaaacatcatttcttcgtcaatgaaatgaagaggctaactcgcttgatttaattcccttgaaaaaggaaagattcactttaattaaactacaaacaatgccgatgcctgcaggtctgtgttccggacccagggaggaccgcactgtaagcggaacgctagcagcctcagcagcaggctggagccgtgttcagtgaaagtaatttaattagtgttgatcatgactccagatgatggtgatttgataaggaataatttagtacttaacagccttttacatgcaccagctccatgtgggaaggtacagcaaattgcacgagatgaatgtgctgctttctcttgcgccggtgccaatgatctggaaaaacctcctattagcagacgctaagcctcgagtcctgggatgaaatatactgtaggcagcctccaactcagcctgtcctggtgggagtctctacatctctcatgcaaaggtaaataagagaagttgtctacaggaagtcataggtatgattcccaggagggaggcaagctttagtgagctcaggtcataaacgatcttgtgcagaaaaatcgaaggcttcggtttggctttaagtttgatgcttcacctacagatatgaaaaaaaaaaaaaagataaatgctgggtatcttagatcgtcctgttagtctttgacttgggactagtaaagaaaaatcaattcttggtccatcatgattcacagccccacaggcatagaatgaggttgtaaagagagtggaaaccctccactggtattgctggggagcttacaaggtggagagagttctagtgttggcatctaaatagaattttttcaagtgctgggtctatttgaacacaatgtgcactggtggagccatgcctcacattggacgcagcatttgtccggttatgataatcacctagaaattcttgtagcctaaaatcattacttggccagcttggtgacaacacttactaggaatgaagcattagattaaggtgcaataacaaggtgctatgtactgggtggcttaaacaacagatacggcttcgcttcatcttcagtggctacagagcaggatgaagatgtaaggaaggttctgaggagtaagagagggggannnnnnnnnnnnnnnnnnnnnnnnnnnnnnnnnnnnnnnnnnnnnnnnnnnnnnnnnnnnnnnnnnnnnnnnnnnnnnnnnnnnnnnnnnnnnnnnnnnnnnnnnnnnnnnnnnnnnnnnnnnnnnnnnnnnnnnnnnnnnnnnnnnnnnnnnnnnnnnnnnnnnnnnnnnnnnagagagagagagagagagagagagagagaatctgctctatgattgtccgcagtcctttccactttcatatccttctttgacatttctgggtttgctgcttgatcgctgccttcagtgtcacacaatggtctctctggaggtcacgacttttgtccacatctccccttggtttgaaggacgctagccatggagatacagcccatctcaacaacttaatttaactgagccgccaaacaaaaccacaggctagatgcagagggaaatctttactctctctgctagttttgctttggaaatccacagggcttagctgcagagctgtgagagagcatctgtggttttggatgcattggaaggggctttattccttgttattcctaaatattctttgcatgcagatgccatactttcttatctccaccaatgcatatttaaaacctttttagctttctttacataataaaacttccacaaacattcctacatatgtcttttggggagcatatgaactccattctcatatatacatacacacacatatagggacatatgtattagtgtaattactggaccataatacattcatattgcagctttcaggcagtctcaactttttctgaggggcttgtacttacttcccttattttgttcaatatcaggattgtcaaccttttattatagtttggtttttctaatgagcatttggtgataatcttgtcatcatattggcaatttcctgatgagcaaaactttgacttagttttcactcattttgctgcctcctgccccatcttgctatttagatattttctaaatcttttggccttatctttcattcttctaatagtgccattaaagaggtcattttaattttagtaaaccttaatttggtaagtttttctcttaggttaaatttattcttcaagctgtttactaatcttcttatacctttggttaaaaagtcctaactaaagaatatagcatcttaagtcttaacaaacttttattcatgtaaattaaatctgaattttcagttttttatgtgactttttaagtggacaaatgggtttctttgtatgttgctacagtttaggaaaatataaaatttcggttttaattcaaagttctagaaattgagtacatacattttgctgtctatatttaaagagcttgaaaataatttaaaagttttacaaaaaaaccaataaatatgttgtagcatacatgtttctcattccaagagttagtgatactgtatgcacacacatgtattacacatgtatacaatacaggaggagagggttttcttagtaaacacagtaaatgcttttgtggttttcttttccatgtatcaaaaattttactcatagacatgtcattgtgaaagaaatctaaagagaatatagtgaacacttgtggaatcatcagattttttaaaatacagtgaaatttattcattagttttatagtcctaaaataagcacatttatgtgaatatatgtgtgagtgtgtttcttacagtgtacattttatgacataactgactttaaattaagctcaatgaatgtacttgaacagtaactaactatgctttaaaaatagttacatattaagttatatgaaaaaagggaaaatactatttgatacagaataatttttattgaggattacatgtggcgaaaatcttccatgtatcatattttaactttatagtttaggtaaatagctaggcagggattttgctttctgtctaaaaataaccaccaatcataaagatgttggtttccataggtcccatacttttatggcttgcctttggacctacacctggatatcctttgtcctgtgtcatgagatcactgctactgaagcaatactatataatacaatagtgcttgactccttacttctatcttggctaaacagatgtaaatttttgcctctgttttagtcaatggaaatatttataacaggttttcgaaacttcttttctgaaaactgagcttttagcattgttaatatcatttcaccaaagcaaaaaaaaaacaaacaaacaaacaaacaaaaacaggtttgcattttgttacacagtaaacgcacaaagggggctggctgcagagcacaggaaatgtccagaatagagtatcaaatgctatttttcttaaaagcataagttactgtgaactgttaatgataatctaaataagagaagtaaaacagactaatagacttaattattgattgacttaaatctttacggatatgtttgttctgtttttagtggcttttcatggcctcccactgaaaatcaagaaagaaccccacagcccatgttcagaactcgggtctgcttgcagtcaagagcagccctttaaattcagctatggagaaaagtgcctgtacaatgtcaggtaagaagccttgtgctcgtagagagcagcatcccttttggaaacagaaagtgtagaatgataataaaatctcaagtcaatgttatgggttacatcttcattacataataagctaattaggtaatgtattcagcagaactctaaagacccatttgccatacaatcacacactttagaatcgttttaaagtaataattctcatctcaaccatcagttgcttttccactgtggtgatgcatcttgagtttgaaaagagggtcttgcttggcacaagcagcttttgaaggttcccatcagaacgaatgcattatgtactttagatagtttgtagaaaaaaatataacatttggcaagcaaaggcagtacattagttatctgacaggctttacagatgatctataaggtgcattcatggacaattgcaataaaactataattttataaggcctagccaaggctattatctattaaaaagccggttgttcttgagatgataataaagggtggtgcattcaaagtgcattgttcatttgctagaaaatttgataacacatatgttcattaaaaaccctttgtagtgaattgcatgctttttacttttcatcttggcctctaattgcattaaaaaaaatagagctggctatagctgttgactattattcttgattacagtagagacttagttcttaaagggaggtggcttgagaacttagaaaaatgattccaaatctttgtgctgtttcataaggtatatcaattcaggcacaatgtgttaggatccggaagaatcttgtgttactgcaaatatacctgcttatgccatcttttacgtctgttagatggaagagtcaaaaaaattagattgtgccatctcgtggcaactgaccaatgctgagatcctttgttcctgtttgctcttgaaatttattgtttcatatgtgactttctaagaggctcactaaagcctaaaattgggaggtagctcatttgagactaaatatattctctaaaacagatctattatacaagtaaactatgagagcaaaccgagttcgtgttagatactaccatgcatttggctatttcattttgttgtttgcattttctcattaaggtgtgtataacaacacaattattttaacattggacaatttccagtcattgaaccagttattatggtgaccataaaaatactgttttatacaatatatctcagacctataaactaacagttgaggaattggccaacaatttgaaggattttgtttataaaaacaaaaacaaaaacaaaacaacaaaaaaatctaagacaccatctctctcagcatatatggtatatataatacatcctggagtttccatatctctataaataataaaatttaatataacaccttacaggggaagaagtaatattttaggatgagtaggcatttttctatctcttttctttcttcctttcttcctttcttccttcctttctttcttccttccttccttccttccttccttccttccttcctttccttctttctttcttccttccttcctttctttctttctttctttctttctttctttctttctttctttctttctttctttctttttttcttgttgtttgtttgtttgtttgagacagggtttcttcatgtaactctggccatcctggaactcactctgtagagcaggctgacctggaactcacagggatccacttgtctctgcctccagagtgcttaagggcatgagccacctcacctaactttgtttcttcttttttatgcgaaagactcaagcaagccaattcataaaaatagtaggtctttttttttttttttttttttttttttttttttagaaacatcagtaaagaacataggtaaaaccaaacacaagacatttttgttttcggcttaagaatttcattcatatgtatgatgcactttaattaaatcttttcccatatttgctcccttctacagttcctcttttctcctccaccaatttccttcccagtgtattttatatgggaacagatagctttaaagatggagtagattactacgtatcacatacccctgcacttctggaaagcatatttaagcgtggatataattctgttgaagtaatagagaaactataagttattttacattaatctgcaaaggaaatatttcttttaaaagtctatcacttttgtatatacacttatgtatatatatacatgcatacttacctacatatatactttgttttgagatcggatctgactagtcagtataggctggggcatagaactcagtctgtagccaaggttgactcacagagatttgcctgcctctgttgcaattaaagtcttgcacgaacttaagcagctcttactaatatttttaaaagagtgtacctagatacctttttgttgttcagaaaataaaatctgattttagtaaggtattttccttgttaaagacattagatatttcaaaaagccacacactggaaagcaattcaaagttatagtataaaacaaacagcttactgtttttgcatttgtaattgagagtggaagttagtctatgataataggattttattcttaatattattttgcactcacaatcaaagaaagcttaactatatcagagacactttaattctcctcattaatctttattatcaaggaattcaaggccaaacatcatttaatataaaagatctagaaaagcaagagcactgcctcgaattctaccacacataaaggcaaatcaaatatggtctttcttactaagctgacattaggtcttgctttgaaatgtaatagagagtaagaatgatactcaggtatttaatgatttaggaaagagctatttctgaaaggtgggtgttcacaatagacagaggttaatggcaatccctcagcacacagggcctccttaactaagttgtctactgaaaatgtatgttacaaatagtcattatccaacttcatatgatatttttctatgtcagagcatgggggctttgaagtttagagattctcttattaaaaaaaaaaatcaaaatccaaaggagtttagctcccttatcacttatgtctaaggtgagtttagttattttcctaggatcgggatctttaaaaattactccaatgcaacctatgctctcgtttgttctctgggcagtgcctatgatcagaagccacaagtgggaatgaggccctccaatcccccgacaccatccagcactccagtgtccccactacaccatgcatctccaaacacagctcatactccgaaacctgaccgggccttcccagctcacctccctccttctcagtccataccagacagcacctaccccatggaccacaggtaagctgcagacaccctttcagatgaaaaagtaaaaatctccaccagtttcagctttcatggaggacgttacccacaactgttctgaagatctctagtgttttaaggtgagcatattaattcggcacatttgtacaaaatattctcagtaaaaggttgctctatcaataataaaaataatttacggagaagataatttgcaaatagtacttttgtaaaggtttaaattgtttgctaaaatgaaattaatctgaacatttctccttcacttctcattaattgcttcacttaaacgttacaacagagcatgcatgtgtacgagtacactagttttgcaaagttcgtagactccttttattaggtaacctacaaaattagggtcattaccttacattgaatggcttagttatacatagtcttacagagtataacttacttgattaatctgtttgctttccttgcaaatgactatttaatgtccataaacccatgactatggactctaaaaaagtgcttcagagatacagttgccaaatgagtgttacttagaaatgaacaaggcaagaagtgagagccatgtaattggagactgttgactgagacaagtttcaatgccattcgggaagaagtacttctttaatccatgagctagaacacaggcttactctattcagctaaattcatctcttctgtttggttcgccattaccagtgctgtccaggaaactctttaacaatagtctccatgggagaaaaagactttatcagaagtgtggacagagatgatggcaaaatactgcctcttgtgtaactatctttgtgatagccctgaatactaagtagaaagaaacatgcaccacacaccactatgtagtatctgtagcctgcattagatgcttccaagagcagaagtaggaatgacatcattaggaaattcacagcttagagtttctattgtctttctgtttaaaatctgccttttaattgaaaagttatacagttacactcaatataaaattacattaaccattggatcccccaaatttcaaaagttcatccaggaacgacaaccagaactggctgagatacatcactgtaaaaatagctgatttgaaaggactcctcgcagtcatcggaggaagcaggtgtaccgcaggcaaatctggatatataaagaaacactttatacctcagtctcaaattgagttactccttgctataaaggaatagcatgaaatctaatttccccatgtgaaacaaaaccatgtcctctccctttggcacccgtcacccagttctcctgagctgtagttcctaaacgcctcctaatgtctttgctttctcactccacaaactagagatgtatttagagtgaaatgctatgtgcatctctctgcaagcagttttgtaaatacagatgagaggatgcccgttgcagggtaggccattaaacaggagcacattttgcagggccagagaactagcaggggtgacaaaccactgcttttgtcttcttccgaagacgcacccgaatttattgtcaccagtgccctgcatttcgaatgagcactgaattataggttacgtcgtctgccctctgtgtaggcaggctatccctaaggcaaggtgactgctgagtaggtagtgcgcttgtttttagatgacctaactggaggtgctttggccagatcaatttttgtctctcaacttgaagtcaaacagttgagactaacgacagccggcccggaactacaagagggaagctcggggtcttttcccactgccccccaactgagttttgagcatggcaccagctggccaatcccaggaaaatctccgaagccttatgtttctgaggaggatttcttagagggctctggccaacaaatggcagtcccttggttataaatggcaaatttgctctgggaacagatcccttccccagatagctccctccagcccaggcaccccacctcactctgggaacagtttacagccagctggcctgcattctgcttcctctccttagcctcagcgcacacctcagaccagccctttggcacgtcttcgtgaacccactgtgcaagagaccggtctattttcttcagccgtgctcccagttcatataccgactctcctaccccaccagtccacctccctacggtcatacagcctccacactttttcctcattttctctttgaccaatggtcaatggctcaccaaatgacacccaagccatacattctcccgggattcatgtccctgatacatacatggcctctcacaagaacaagtacaaatcacattgacttgtaaaaagcaaatagctttgcttccttacaatgcttccagtgcgagcgatattagcttccttttaaggcttcagaaaggagccagcttcttattttatctccaagttaccattttctgattcactccttgacagttcttaatgataatttctgtttctttttttggctaatgaaataagcaagagaagggaaatgcatgcagtgccagccagccccgctgtgggtttcacaatatctgggcttctaagtttattttgtgcaggtgtaagcggaatttccatgtttctcatggtagccggtatacctagagttaagccctggcagggagtatgcttccgaatgctaaagcaattgctctgccattctttgggttttgccttattttcatttaacattactgaaattaaatgctaactttcaaaattaaagtctccgggacgcttttagtggggagggttaataggctaatatttgctcatggatatgttttagaggttattttttaagcactcctggggcatttttagagtccttttaaatctttaatcagtccacatctttgtggtgggtcaatgatattatggatgagatgtacagaacagaacaattatgtgttcagccaatctttaccaagaaggaaggagcatgggactcaactgcagctctctgcctaggccttagaacttcctcatgccctcaacagcccggcttacccgaaacctgcatgtcttgggtggccagctgtgtatgggtgcttatttttcaatcagctccacagtttggaggtcataggatccagaatgtgctataatgttgtttgacaggacagatagagactttttaaaacaaaagagccatcataatgccaagatttatttcttacaagaacacattgttaatttggacattgctgaagaatttaaaggcctgctgatttgcgaagagattcagttctcctgtgcttcctgaatttctgagggttaagaaaggcaagccaataagtaggtttttgtttggaggttcttttgtttgggtgttgattagtttggtgacagaatttaaagagagagaatgccattggaaatctccttctgcccccgcccttttttttcttacctttcattatttgagaaccctttcttctagaagttatgtaaatgatccaattagcttaaaattggtcattttagctgtcagagttcatattgattccaaacagttggttgttctccagctactggcagtacacctttaattgcatgatacgctgaattgtttgcaatggatgggttaaaaggggagtacacgtcatcatgtgatttaaaacaaatcatagcactactcttctaagaaagagaaatctgaggctcactaaagctattgacattgagacgtttaaagtgcacactagcagctaggaattatgtaagtcctttaaagacaactttgtgttaccatttcatctgaaacacgctctcttctccagatttcgccgccagctttctgaaccctgtaattcttttcctcctttgccgacaatgccaagggaagggcgtcctatgtaccaacgccagatgtctgagccaaacatccccttcccaccacaaggctttaagcaggagtaccacgacccagtctatgaacataccaccatggttggcggtgcagccagccaaagcttcccccctcctttgatgatcaaacaggaacccagagattttgcatatgactcaggtatgcccatcctcttatggaattacatgtaaatcatcttttcacctcccttgttgatttgattatggttgttagactgggtgccatctaaccattaatttctaagtagctattctgattttatcctgtatttgggactttctacagttgagggcatgggttatccgaagaatttgccatgagatgatgttcaaaaaaaaaagtgtctgaaaatgaaacgacttcaaagacagtacaatttatagaattgcacttactcaactaagagcagaaacttataatttttttttgaactttttcttttttcttttgtatactgctatgttaatgctatttagaaataatattggcaaagaaatggtcttttatggtatgtatttacacttggtaacttgacacaattcttggtgtcaagaattccagtggtcctaacgtaagagttcttacatattagaagaggaacaggaaaaaaaaaaaagcagagttaagattccttcgctgaattacgttttgtctcagagagctggaaaatctactccatatcatctgtcagaggaaagaggtcttcctgaacgtacagaagcttaaaattgattccaaatgttactaccaagttttgccaacatttaattttgaaactgaaaaccttacctaccttgtctctattgagtttttctgtgaaattgggacataagttttttacacttctaggtattttctaagatgtgtgaagtaatgggtaatgtttgtgaggagggcaccacccacctgtaaagttttattactaacattgtagccaggtccatagctggtttttgatgtggagatacttgagagtggtccaatttccttccatctggatgcaagtgaacggacatcctttatgaaagacctattgtaataactgctgagttctgcttaggggacaggaagctgcttccaggttttattgaataaaacaatctgttttattgtgaaggtctcttagagttcagcacaggggtccctgggatttaaaggctctccctcagtcgccatccttacaggataggaagggaaaggactgagggcgttggtgactctaaagcatgcttcaaaaagcacaaaaacagagtaatttctcagcagccctgaatttcctgtccaactgacgttgttcctgggcttggggtagattctgctcaggcatggtttcttgagggcagaacatctgtttgtgcctccagccaggtctagagggaaaaggcagacgcaatgatccttaagtttgtatgttaggccttgctaagtctgggggaacattgggccaagggctaggaaaacaggtaagcctgtctctgcagaaacactggttctaaccatttctagggttaattttaagaggttttgttaaaagctaaatttgagctggacttctgtgttgtttgtaaaatatgttctcaaagaatcaaaaacaaaaaacaaaaaacaaaaaaaacccaaatatcttttttttacaccctcccccccaaatatctattttttagatcctttgcagtttagaaaactaactgaggttgtgcaccttgggaacttccttaaaattcttcttagtgatgtgagtttagagccttttaatatctgcccttgggtttccataactaagtgtcttgaaagccaatgcttggttccactggtaggtaaaaaacacatttcagtgtgaattccaaatcctgttaactgctgtcctgcttatctctagctattgttagtttgccacagtaaagtttaattagctaatcaacaatttaaagaagccacaggtggaaattatctaagtataaatagtcaatcaatgggatttgtataatatgttgcaatttttctattttgctgttgttaaacatataatactggaggagtaacattgaatctttttgtgattctctaatttatcccacatgtatcttctcatgtgcatatcgcaagcacctgtatgtgtagcgtggaattaagcatttatattttgtgagccaagcaggaagagatttaaggaatccaatcaggcaaacatttaagggctgggtttgtaagaggtaactgaatctcttatgggtcaaacacagtgtggatgttagagtcagccactgtgtgtgtgcgcctcaaaagctcaccttttgccacctttttaaggtaagcatccagcatgctatcttaaaagtgtgccttctctctttgaagtgtatcacgtgtcttcaactggcttgtaaaatactacttgacatttgagagagattgattttatgctatgccctccataattgtattttaaaacggcaaagttatataatacttttaaattctaatctcaattttggctatagaattcagctgtatttgaatagttaaacggcaaaggttgcacttctgggtgtgatttataaggaagagctttgtgatatgatttagaagagaatcattcattaatctgtggatgtcaaaatacattttgccgctatgcaattggtcctttgtatgtatcacatactatgaccaacaaggatgatctctgggtattttgtttgtcattagctcattcatctttcctgagagcacattaaataaccttttaggaactctaatgtatttatcattgaattaccactctctttttcttattgattttgaacctttaagacatactttatgtgcgatttttaaacaatattttttaaaatgtgttttctgtgtgagttgatctagaatctgtgatctaaagttatcgcttcagagggattctgggatactttattgcttaattcaatgtactataaatgttgtgacaataaaagatgtcttcaaagagaaaagacagcatgattgtgctctaataaaacctgacattaattatgacatgggaaatggtaggtctattagttataattataattacaggaacgcaattttaactgccgaatatttaagataaaaaattcaaaatattatgttattagagtagaaatctttattcaaggaaggaaagatgggggggggggagttgggtcagagggagaagagaaaagaactagatattcaagaagctaatttattaggccatacagtgtggaatagttacatcatggcaccatggtggaaagttaaggcagtacgtctactctgttgatttgtttctcttcattagacagatagtgctgtgtgaagcaccacacaggtttttagttgttgattagttgccttctaaattaaatgtatatacagcactctttggacaagaaaccatacagggtcaggatgtgtggaatgcttcatgtggaatgtataacagagatcctctgtgcagccttctacttccaaaaacgtgtttgtccattgttctaactgtctatgtcagcttagaatgtcagtgaggtagggagctactattcatcttaactttctgcctttgagaccgtcttgctatgtaaaccacagttggcctgggtctcacagtattgaccaaggtagccttgaatttgtcacaagtcgtcctcctcaacctctgcagaactatctatctatctatctatctatctatctatctatctatctacctatctatctatcataatatctatctacctccataagcttattgctaagttcatggtttttcattgtatttgttcagaacaaaatggagtgtgttacagatttttgcattttaaatgagggaaatatttaccttaatctggatgaagggcttctatatggctgaaggctctctgagatccacggggatctgacaagcacctcgtgttttcagatttagaggctatgtttccctagtttaggaaatcacacgggccaggggtcaaactctacttacgttttagatgctcactgcttgaaggtagcaaattataagacctcaaatcccgtaaaaggttaagttttaagattaagttttactgtcttatcttttctcttactttttttttctaacaaatttattgccaattttctttttcccttttgagatggggcctcactatacagtcctacctcgtttgggcttcactacatgaatttgatgaattcacagatatgtgcctccagaatgctgggattaaaggcaagtgtcaccttgcctagcatctcaaacatctttaagaattaagaatatcagggctagaaagatgggttgtctgttgagagtgcccattgctcctgcaaaggatgtggatttgcttcctagcctctatactacagttcacaattgcccgtaactccagttctagggtatccaaagttgttttctgacctccattgacatcagatacacagatggtgaacatacatatgtgtacgcaaattctcatacacataaaataaaaacaaataaatcttgaaaaaaaaacaccatgagtttatcaaaatttaccacctctttgtaaagtgcttctgtcaaaggctcaataataattagaagaaagacaagcaaatgaatagcccactagctacaagtcctttgtatgcaacttgattttgtctgagccctcttaccagacttcagtctttcattttaatatcctggtatgcagtacctacagttgatctggaacagaagacttgagacttctgtcagctgtgttcattttcatacgagccaacttgtgatgtcctgcagtgtctgaaacagatgtcaggaagcccttggaggactagcatgtccctcttttgattcactgtaaacccatccattcttcacctcagcaacttctctcatgtcccccaaatatggttatatcaactcgttttctgtcattagctagtaaaaatgtgacctgtaggcagagaagtgggaaaataattgaagtatatgtctagtattctcatgggccttggctgacacttcaacaaagagttctgaatcctcttcacgttcagaaatggggctaggagagggtgcttatgtcctgagtactgttctgtgttttgttgtgttggtgacttgtcatcctaaacatttagatggacagcagtgaagtgcaccttaactctgtgagcatagcttgggcttcttgaaggatttagagcatgattttaaattgaagcttatatggtcaaaaaataaacaaacaaacaaacaaaaaccatagggtaaggcactaagaacagtgtggctatttgtgtcttaatagactccgggtggcctttatgtgtttggagataatttgtcagcaacctaatccattgactaaacttgtaaaacactaaagaaaaaaataataaaattaagaaggttagaactacacttagtgtgtcttcagagtatgaataccctcattgttactttgccctttaagaatatcccagaactctgtcatcagtgacagcaagcctaacacaaacagctggagaggagggagaatttattttggatcaggctttcagagatgtcagtccatagtccttggcagtgttgattcttggtgtagggtgaaagaagacatcactggagtgggaatgtgtaagagaggctaggctgctcatggcccgcaatctccacaaagagatgggaagggggtggctggagaccagatataatcttcaaagtttctcctgggagactgagatgtaacggagacttcctccaattcctactttctaccaccttccaaatagcactcacacagcaggagaccaattctttattactggagcccattagggcaccatgtgtgctccaaccataacatacacacttttgcttacagaaagagaagtatgtacttatattattggaaattcagcgatttcttttttactgaagaaactatttttagtcattttttaagaatcaaatcagaattggaatttttttagagagttcggtgaccaaacagacacggtgtgtttttgtgccatgagagtcaatgcatcctttctaatgtacaccttccctgaccagctacacaattatcgctgttcatttcctatagaatgcaacacctaaaataggaagaggcacaatatctagaactttttatctctttaaaaatattagggaggttccttcacgaatgatgaaaatatacttctcaacacatttagaaagaaaatataaggaaaaaacgtggttaatacgcttaatttatagagcagtataccttaatagcaacacagtgttatagcttgcatatctttgtgctcatgtgactgacaaggaaatgaagttcatcacagccactggccagcatcacagaacccaaccttttatctccaaccctgaacgtgagcccaattcagaatgtgaattatagctcctaccgagagcataatgctcttgtgccacatgaagttaaagttaggaggttgttcacatttcagtttaagtactggagccaaatcacaaatcaacttggatatattttaatatcaatctcccaatagttgttaggctatattccataaactgctttaattgtgttttaaatgtattgactcatggaggttatgctgtacattaaattcttaaaaatatgaaataatgttgggtctggtggcacagtacctagaggcaaaggcaagcagaagacagtttgaggccagctggatctacaaagagagcctcgggccaacagggttacagagtgagaacatgtctttaaaacaaacaaacaaaatcccaacttaaaacagacttaaaatgatgcatacttattcattaataatgtcccataccgagggttatcttcatcccatgtagcttcttcaattataatcttgagcctctaagataagactgcagtcttgttttctatcactggtttgcctgatatcagagactgttagttaaatactgaactgtcttaatgctatagtaagaacgaatttaacacagactgtcctgcttcgggctgcctctgccctctccagtcctgacaaggcttccctagtgatttactccggtgtgaacacagggcctgtggattacaaatacgttcctatgcaggttcaagtaaccaagagacagacttgctttctttcctcgtccagatggctggcaatacacacgtcgcactgcttaggttagaactgggccttttcaattcatcctcgagattgcttagagtagatcattttggacatttctatttttggtcatttccagtgcaactctgattatggttctagaaactctggctttgtgtacctgagatgtgacactcccgaaggctcagctctgctctctataaagcatctttactcaaggccacattcctttcagcttaacttcgctctttcctaactttttttttcttcccaaattctttttcttttttaattaggtattttcctcatttacattttcagtgctatcccaaaggtcccccatacccaactccccaatcccctacccacccactccccctttttggccctggcgttcccctgtactggggcatataaagtttgcaagtccaatgggcctctctttgcagtgatggccgactaggccatcttttgatacatatgcagctaaagacaagagctcccgggtactggttagttcataatgttgttccacctatagggttgcagttccctttagctccttgggtaatttctctagctcctccattaggggccgtgtgacccatccaatagctgactgtgatcatccacttctgtgtttgctaggccccggcatagtctcacaagagagagctataactgggtcctttcagggaaatcttgctagtgtatgcaatggtgtcagcatttggaagctgattatgggatggatccctgcatatggcaatcactagatggtccatcctttcgtcacagctccaaattttgtctctgtaactccttcctttcctaacttttaatattgttgctgaaagaaatggacttggggatgttaaagaaggaactattgtttttttttgttttttgtttttttgttttttttttttttttttggaagatgttaactttctatttgttgctctagcctacaatgatagttttcttttactcaacctggggtttgtcgacaagtaggcggatgtttcaggtgcttccattgtgaaaagtgacagtggtctttacctaattgatcttattattataatagttgtcacggattagcctcacagtttgacttagcttctaatggcccaatgtgggttgtgtggctttttctcatttgattctggttaaagtagtaactctccccaaccatgatcctggtctgtgctctcagtttttctaagaaatgcttcaatatactctaaatctacagttactgtaagtggccttggcgagtgatttgatttgagaattgagactacagtctggatttactcttcatgcattaacacaggtcaaatggacagggactgcattttaagtcagtaatggaaggctgaaggctgtcttaaaccaatcatatcagttttacccatgactgattgatccctaggggcagagccttgtaagcgtttcttttccatgaatggactccatagagcctggagtttcattcataaaatggagactgaaaggaaacacacacacacacacacatgcacaaagcctgactctctggaatgtcatttataaagagctggagggtgtagtgttccatcagctgttgcttttgccagttgactggaagtaatgattaatgttcattggtcctgcttgtgtgtaacctgacaccatttatggctttccagagttcctaatgtatggtgaatgggaagacaacattctcaaatcagaaacataaacaggaactggtgggtctgaattccattcaaatatgtcatctcagccccactgtgtttgtctaacttggattttgcaggcaggaaagggggaagggagggatgacatgctccttagctgggctagtttagaaaggggaacttgacagggtggagtacacttttgtagtgtgtaatttatgctttcttttcaaacagaacaaccaggacacttaggctttgcgttgcttacgaccagtggctgaaatgaacatcaactgtttttataagtggagctgagatttgaaatgaaatgaaacagtttaaagaccactgggtttgaatgtatgtgtttagtgaatgtgaacaaaagagccaaaagattaccttcttttcaaaacggtgtgtgtgtgtgtgtgtgtgtgtgtgtaaaatgaccacacctgtgcattcctgtgtctgtgtgcactcatttgagtgtaggcttttggattttaaatattcttatgaaatgttttggagctcaattatttccatactcaatgatttagctaggtaagtggtggaatgggtttcataacttgaaataagttttttttaaaaattgtattgggttaaagagatacttattgttttcattgtgtttttatttattgctgttaatagttgttggtaactttcttaaggacagataatccaaatgaatgggaaaatactcaaaaaagccaaataaagttgtcaaatgagcagtgctagggttgtgattatttaatagatctctaactttgattttaactcctctttctgtgtgagccttaagagcttattgctgtattactgtgatctgctttttagttatgttcagcattaattgtaaaatcactcagttcgtgtgacatttgaaaacaccaactcctgggcctgatatctgttgaccatttgtatcatatggagcaagctttgcgatttcttttgcctcccaatttacttatttccaaaggggccttagtgtatttgtagagatgaaatattgtcatgtttaagcagtgcctaacacagtatccagcatagattagcagacctggcaccgatgaaggatactcagtgggatgatttttatcatgatttctgtagatttcttcaaagtccttcaacaaagtgccataaactcatacctcaggttagaggataacatgaagtgtaagagatattctactaaagccatcatatatgaatccagtatgctgtgtctgacctagttcaagctaaaatctgttacttgttccatttttattagaagcaagcagaacaaattatcccaatatggtaggaatcccaggaaagatgaaaccaagaggaaagactctacctcccatactctcctttcaaatcatccagcgtccaatgggaaacaaatcaggaccaactgggtactcagtatcaaattcttcactgcagactgttgttgtgaatccttgagtcagtcaatggccttggttctcatatttacttttaactgccatactatgtgttaactgccacactatggcattattgagtaaataccccaaatcacaatgctgctcctgtcttctgatactttaaccttatttttgactagcttaatgaaatcacaaccctgtaaaacttacaaaatcctgggtttagaatgttcataaactgtttagacctgcttatgttttgtatgtgatactatccaaaaatagcccagaagcttatgagaaatatttgtagtttcatagggaaagtcatatgccactgtgtgccactacgctgccattgtgtctcagaaacattgaattctcttcattgcaatactccttcttctatccttggtttttccaagagtatggtggttaggaatgttcatacttccctgcctcattttagagaagagtctgtcagtgttgacttagcttatttgccttcatagtttgctgaaataaagttatcctaagcatgaatgaagcaatactgaacttatcacttccttcttaaaacttaagccatatctttcttttcttccagtactttcttttgtaagatgcatttattttattttatgtttatgagtgttttactttcataaatgcctgtgtaccacgtgtctgccttatagacagggaggtcaagaaaggggattggataccctgacaatggaattacggatagttgtgagccaccaagtgcatgctgagaatagaacttaagttctctgcatgaataaaataatttgcaaaaccacagcctttgagacagctctccagcccttctgccacctctttagactatcctgcttagacctttgagactgaaaaccaggaggtccataaaacttcagtcttcagttccttgtttgtcttctttctcatgcaagtctagacatactactgctggaacttattttagacttaataacttgcagatttcttcaatatagaatacattattggtgcaaaaacatctttttcatgactatgacttttaggaaactataacatgtagttttcttgactaactatatcaagttcattcatgcactgaatgtaaaagcagagttaaagggtagcgtgagtgtttctgtatttgtattgtatttatcattatgaagcttgtgttatttatgccctggacatcctttgttttttttttcaacctaatatgtgatatgaatagaaatttggaagaaagaagcccaaaccagggaagtatcagttaaagaactgaaggagatgaaaacattgaagaataaggttttaattggtatcataagttgttaatatagctcatgtcatgatatttttctctttagtgcttggacttgaaccaaatacttcctgcatgccaggcaagcactctactatgtatctatatgtatctatcatatagatcctcagctacctcaggacttaatacagatattttcagaaatttgttgattaataatactaacaaagaatggttaaatcttccaggtttgcattgatgaggacagacacacacacacacacatacacacacacacacacacacacacacacacacactcacacacaaacacatcttacaaagtatataatacttcaaatgcacagaatacatcattttggccctgtatatttatcattttaaaatttctcccactatgcatgtgaccccaggactaggcagggtcagttaagaggacagaatgtgaccctattttaaaagtgaatgaaccaatagttccatgccaccttcacttagtcatttcacccctacaaggagttaaaatgtacagtcaggcaatttttgcatcctaatttaaatgaaagcaaaggcacactcttgcgctactcctcctttagtgggatatgtcttttaccttaagacattggaaagcttaattacgttgtgcattgactattactgcaggagtctaagcaggagcatcaaatgaaggaaactgcttttcctacccccttgttcagtttgccttatgaactaatcctgcttttactcactatttgaaagcaaagcagtttcagccaccactaaaactgccctagatgagcatgacaaatctttcctgtctgagcctggtgtaccttttggaggcttagacaaatgatagccaaaggggaattttcattttgtacaactgagcatcaactatgcaaatcaaaggagtgcctggcatatgacatgtgcaaattcagagctgtacttcgtggtcaaacctttgctaaagctgcccagatccaaactgtattttccagttcagcttttacattgttagacaaagagggagaagcagctcttttcaaagtttctcgcacatgtatcttgagatggtatcacttcaggtatgatacctttagtagtgattcttcatgaagcctaacccaacagtgcagttcggagagttagcattctttgttcttgactccacccatacgtcatccaagcctggagttgccagcaccactgtgctgctttgaatttttacagcatattaggtcagctttcatcaccacaagagctcatctgtaacaaattacagacgttgtgatttctgtgagctgatttggtcaacactaatatcgtgttttagaatgctttgatccacaagtttcttacagcactaaaaatcctttgtcctaaattcaatttatataatccaatttatagactgatttttaaactttatagaccagtgttatttaagaacaaacgacaagggttaatattggggaaaaaatgaatttcaaagagagatccttgagtatttaaaatgtctgatggaaactctagcttaatcacaaatttgtgatgactgttcaatcgatgtatttttagataccatagattaagagataaatttacagagactattccagagtaacttcactagtaaccagcaaatcaactagtgaatcatgagacttaagaacagggaattaagatattaaaatatgtatttatatcctaaattcttactgtctgtgtatgcttagatgaagtatcacttcatatcaagatacatgtacagtacaggaaactaaaaagagctgctttctccctttgcctaacaatacaaagctctgctggaaaacacagtactgacctgggcagctttaccaaaggggcaatattacatacaacttactccatatgctcctcttaaaaaccctttgaaaagtctcagtagcactcccattttacagaggagaaggttgaagaaagagctgttaaccaacctacacaaagctacactcccacaaaatgagagacctcatacttgaatgtgcacctagtaggtgacattgtggtcattggcaatcactgggttgcgctggtcatcctataattataaccagaggttaccagagaagatgatattaatgtctcgccatcctagcatgtttccagaggagattctacagttgactgttactcttgcattgtactttcttccacaagtaaagtggaaggctctgcacagcgacacttgcatccctgtcacccattgtctacctttgaagtcaccacttagccagtttggttcttagtggaacgtttagcaaaagttcaaatgtaatgccaaatcgcaccagttgtacttttttttttttattattagataaggtagaaatgaaagcagcaggcaatttaattagcagtaatttttctgggcgagtcattactttgatgaacttcagagcaatgtttacggcccctaattaaccatgttagtcatttgattgaataatcactttggaaatgtttctacaatttgattagagtctgacccactctgatagtcataaattaactgttatcactttagaataacatgactttagttattctatgtgaataaacctcctagccctgtcctttatttaaaaaggaaaaaaaaaaaaaaaaccaatctggcttctctggactatataaatggcattcattttaagggcagagtagatttcaaaatgctagccaaggtcttgcctttaaaatattagttgttaattttatttgctctcatgtagtaaatggtaagaattggaaaagcacacttttctccataaattgccactcatatccttgtaaaaatgtaaatcacacgttgttctttggagaactgtaatgaagatcctggcctcagccctattatgtgttactgattttgaaataaatttagattttagagatacctatttaaaacatggagatgaagagctacagttctcgaagaacatcacagtgggagagaagcaacagagggagcaactgctttctagacgcaggattagactagctgtgcatagagtatcttcgacgctcttgtttggttttcccagagtacggtaattttacaccatgttagaacattctctgggtatccttccgccttgaattctgggttcctcggaaatgtttgagtgttctcctagcccccccttttttcccctcgggatggaaagtgtatctttagccacaccaacatggaatagacttcagcctctgtcttttcctctagcttcctccagagctgccagctgttttttacagccgtaccccaggtgtgtagccgtcagagaatttttgtggagtggtggcatcagtatagtgaaaggcttgcctctgagcagctgttgcactgcctgcaatcattaacactgtcccttcccaggcccagctgttttgagggacctttcgcctggcaatagatcagaataacattaaaaattaatgtgaagcttggtcattagtttgaagttggggtaaagtggcttgctaactattcggccaattatcaatactaccaggaagagaggcactttaccttcatagagtcagaattatgttctatgtaataaattatatggaccacgttatagaaaaatgtgtgtgtgtttaagtttcacactatcttcatcatgtaacctacgatttattatgtactttcattttatgtatttaattttttttttgatgctggagattgtacctagggactcgtgcatggtgtgcaaagggttctactacagagctacctgcccagcctcttactgcctcggctctaattggttttcttgcttttgtttctgaaacggagtctctgtgtaattcagactggcctcaacttcacaatctttcttccttagcctcctgaatactaggattataggtggttactaccaaatccatactttttaaaatgttagaagtgtggctgactggaaagatcttttagattaaacccatatgggttaaaatatttttatggtaaaaattgctcatatttttgttgacattagtacaaaaaattattatttgtcaccagactcctccctaaaaaatactgacattgaaaatgaaaaattctagaccaaggggaaaaccaagccaaataatagatactgattacccattgttacaaggagtgtgtagataaataggtctgaagagacaagggtttttaaattcaatccttaagaatggtgtattttaattacagagtgggaaagtgggagtatttttcattaaatagtacatttatggcacacctttagtttttttttaatgttgctaaaaaaatttactaaaacatacagatgatctaattggcttgatcttaaacattaatgcattcaagaatagggaacctgaaactttctgttttgaagaattagttttaaggaaagtgctctaaaatgaagtactaaaaactagggattggagctcagaagaagagacttctaaaatatggggagggctttctattgggggctgccatacatctgcttctggtttcagaatgaatctcttcatttcactaggaactagagagctgtagtagatgccagggaccatctctcaaccctttattctatagcaatccaagtaaagaaaggtttgtggaaatttatgcagtttgtaaggacttgatgtttgatccattgtctcctgctctgtgtttatttcattttcctgtgtcaaaagcattgagcatggtcagttctgagtcagcacctgagccaggcccacagttagccctttgctttctcttccagaattcttggccttgtaggagagtctttcctgggacaggcattgtgaaactgcttattatgtactgtcctttcataggctttgaacatgatctatactcttaataaaaatgaaaggccagacatgctattatctgaggaaaacagttcaaaattatcaagataatttatgaggtttaattattctgtcttttcttagtaatttctgtctagtattcatgaagtcacccatgtctgaaccatttagcactgggcatagagaaaatactgagagatatataaattcattccacttgcccttaaacatgctagtgtgccatccatatggtattgctgaacttcagcaaaggtgagttggtaaaaccgtgttgacttgcttattgaagagatttagcctctcctatgatccatttagctttacgtacttggaggccccactgaaaatgttttccacattctgacagacttgatcattggtgctcttgatatttctgtgctgttctgtgtattttacctgctcttcctttctaatgtgcctttctatgacacattttgtttcctctttcagaagtgcctagctgccactccatttatatgaggcaagaaggcttcctggctcatccaagcagaacagaagttaagttcattttataagattgcttataaataacattaaaagtaatcagatattccaaatatgggtctacttactcattcattgtgtgccttgggaaaatgcaggtatgttcctaaaacatatataaaataatattgtttggggagatagaagatgagtaacagcagagtgcttgaccaatgtccccaaggccatgggcttagtccccagcaaggtgacataagcaagcacagaccctgctctatcgttggaagatgaaaagatagtgtttcccatcttagtggcttgtattttgctgtgagcatgagtcttgtccacacccatagctgtgttctgccagcaacttgcactctgtcaactagaaacagctccttccagattacccaccttatcgcactctaccgacaggcatcttggaaaatattgagctatggtcttataagcctaagtcatactttgaagtaaaacatggtagtgtgactttgcctttcactgtcctgaattttgtaccttttggaaaagcaattattaagaatgggttcacataagctgtgtagagacagaatttttattctaggtaaccacaatagaatactctgctctaatagactttgacatctgcaacctaagagacaagaaatgattatctggaaattatctctactgaaggattcctggaactatgtgcatgtttcttcaataaaattgccatagataataccttttcagttaggattagtattcatgattttatatgaatgatattaatagacatttactgatagcaaaagacagtacatctaaaatacttgagaggaaaagctttgcaccaatgcagtgtggttattcttgccgatgttattaatattataaacctaccatagagaaccttgctatggttgaattgtatgaaatttcttcctataagcaaaggtgacaattaggtgaataaaatatatgtgagagaaaaaaggcattattagaagatattaatttatttttactttttctatgaggtgagttatgttatagcacaaaacaaaacaataacatcctctctcttactctctagcctattaatgatgagatggagctgaggagatgacctcatgggtggatttgcttaacaccaagccttgcaaatttaattcaatccacaaattcacatggtggaaggagaaaccacaagctgccctccaaccttcagggccatgctgtgacttccatgaacacaaaacacatgcacacatccatgcacacgcatgagagcacacacccacccacatgtatacacactgtgtgcacacatacatgtgcatgctcgtgtatgtgtgtagacagtataataaaaaatatttcaaaatgataatgttagctttccaagatatttctgtaatgaagtaaacggtagactaaatgtgtttcagagtgcaagaacaagaccagaaattggctttggtgtccctctcttgaataatgaaacaaagaagaagccaggaaataaaatgatgcattattaagcataggtttgatgggatttttgtgaggtctctgcttagggtcagcagttatacatctctgacgtttatgtatcactgtgctatggcgcccctctaaattggagtgcatgaaaatcattctgtactcacactagctctaccactcttatacccacttgatagatggaggcaaagagccaaactaatgtctcaaatatcaaatggctagaaggagacggagtccgtttcaagacattgtgtgtgtgtgtgtgtgtgtgtgtgtgtgtgtgtgtgtcagtggtggctgaagaacctttgagcataatttcatattctcccattaatgatacatattgttttccttccacaggctgcatgtttgagaagggtcccaggcagttctatgatgacacctgtgtggtcccggagaagttcgatggtgggtttctctcgctttacactttgactttatgagcggagaccactctttccttttctgaaagcagttaacatttgtacttagggggttcttatacacaccatttgtcccaccctcagggctgtgcagtccttcctcctcccctgactgacctcttaggttccttttttggagacgggagagaagatcagcattgttgctgtgctctgtgctgagcagggcatctttccactgccctgcggagcacatgcagcttgttatttgagatttactgaaagccgatcctgtaattaacaaagcagaacagaaagcatgctactgtggatgcaccgatgactaatgcaggccctttctttttattgttcatgaaaagatgcattatggagcacaggaacgacataactgcccattgagtctactgattgcttgcccccacaccccaccaaggaagatgtacattactaatgtagcattatgttgtaattgcttaaaaggaacttaggaactcattaccttttaaatatctcttgctagtacaacgaataggtccccgatattagaaaacatcgtcaaactagatagagtattcttttcttgacaagcatagtggcaaaagctgacatttacaaggaagctttgggaaaaagtgaacagttaattcatttagtggttcttcggagtggtctccatagttcctgctttgattgtcaaacaggaaatgagcaggggccctctgattagctgattgcaaaaactttggggatctaggctgtaatgacttgggcgctctcagaggttttaattgtcattatttaaacagcaaagtgcatgctcagatttctcttcaatctcataattagttcttgagggcttagctcctaagcttcttgctgctctcgtagcttttgggaaggatggtgagttttaggaaaatctatttccttagccttccttacgatggctcaatttattaaaggtcatggagttgaaaccccaaagggggtcccttttttttgttttcttctacaatatttacacttcggtttcagcagcatgagttgtgttagctgccactaacagcacagcatcacaactcttaaatgtggctctttctgtggacatggagcttaaaacttgctttctggactgtcctttcttcctttcatttattgtgagttttgcatcttaaataatcttaagctcagtaagggcattcaaggagggaggctatctgaaaactgtggcaaaacagaatgctagtgcctacggagctggctgtccttcttccctgtctttcactgttatttaactttatattatacatatttatgttcaatatatatttgcctccatgaaaaaaattaagtactagaaggaaaagtctgagataaataaaactgactttagatgaacagaacacgcagacaccttgttaagaacaaatgcaaatcaccctttgtcagtggctgttgactgaatgttggtgtgtgcgtttgtgtgccttttaaagtattggtttttttttcctgatcatgtgacaaggtgtatttctacttaacaactacaagaaatttttagagagcttgtgatttacatttattttgtagtccacacttaatatgaacagaggcaggtgaatatatgcttcctgaattgtttcttcaaccaggaagaaaaattcacacactgaccctgagcgatctgtaggcattagcttgtcagtctccagtgcaggtaggcccatacagttctgagaagcatggctggagctggaaggaaatgagcagtgctcagaacatcaatggctctgttttgttttcttttgctttgagctaagacagttgaacaggaaagtgagagttaacgccagtactcatgctagacacttttctatgccataggaggtaaaggcggcacatttttttttctttgcctaaaaaaatctattttacagaatgtgttgttatataccatgtaaaattggcttttaagaaaaaaaaaagaccaacaaacaaaattaaataagcaaaacacacgtaagttttgttcatcaggaatgttgttttatttattgccaagtgacaaagagtggcttctggaggaaggtgcagtaggtggaatgctgccactgctgccactgactcccgcaagagagagcttcctaattcatacaaagcacaggccacacagagtttatgatattaccaaatttaccttgaaatatgctcactgagatattcagtagtcggtcatatgcaggtcaataaagtatttgcaaattacagtttgtagaaattaactgatacgagtaaaatgcccagagcttgaagctgattactcttctcttagtgttagtcagagccagagaagcagcatttaatgaagcaaacaagcatgattgggcatgatggcttgtaaaggcacgagggaaggatagacagttagaccaggttgttagaagcaaatgatgattatgaacatattccttaccggtgtacatttgtattagtgagaatacatattgttacgttgtccacaagtttgtatgtattggtttgcttttaatcatttgattattttaaatctgtatgtaacggtgctgtttacaaccacgatgaagtgattgtgtttagcaattttcatgattgatttggtgtaaattttacacagacggcataatcgtgcttataatcatttattttttaaatgtaggggacattaagcaagagcctggaatgtaccgggaaggacccacgtaccagaggcgaggatccctccagctctggcagtttttggtagctcttctggatgacccttcaaattctcatttcattgcctggactggacgaggcatggaatttaaactgattgagcccgaagaggttagtctaagtagattttgagtaggaatctgaacagtaaacatctgttcagaggactagttttgcagtagaggacaggcttcacaccaaacacacatcaaatactcaggagtgggaaaaccgttgctaattgtttgggtgtctaaattttctaagatatttagagccccatgtgactataaagaaactttgatttcctgtagatgcacttcaatgatggaagggaagaaccacaaaattatcctgctggcaacataggctaacgatgcctaacagaataatcacagagctctttaccgtgatgggaatgcatgattttaataatcaaagctagacttggactggagaagttcaatgtggctttgtgtcatttaaacaggcattttcctccacctgcaattaaaataaactgagcagaaacagaacactttacatttgtcatatgtgttaggacaagagacattactgaataatatcagtaatgttcgagccactcaggagagacaacattctgtgagtgagtgactatatctatttagcagcctatggtatttatgtgtttgagtctgaagagaagaatggagaatctgactaggtgaccagtcaatgccaacacattctgagttttcttattatttaaatgtgagaaagatacaacatcacatctgtttcatacaattgatagttcatccactttgctgtcacagatgcataaaatcaataacaagactcaataattcagtcagttgactactttcaaatgttgacaagctcactaggaattgtgcaataggcactacatgttccctatgcttttattccacatctgggaatccctaggggcctgagaagacagctcagtaactaatgtgcctctgcacaagcatgaggacttcaattctgtcccaggaagccatgtgcaagcatagcagttgatcccagcccactagggccagacacagaaagatcctggggacccagtggccatctagtctagctgaatcagcatggttccatgtttaatgagagatcttatctgaaaaggcttggtcgagactgattgaggaagacacctgccatcaaccttgctcatatatgtatataccacatacccccacagccaaaaaaaaccctgaaaatgttaaatagtctatttcttattggtgcctacttcattcttaacaatcatataatcaaacaatgatcatgatgtttcttctgatttcttctttggaaagaactcttgaattattttagtctgtgtggccccacaggtcctctctagtctccactacataacaaatctttccgtgatgagcaccacaatccatgagtgaggatttggaagctaccatactgttcaactcacaggacttattttctcatctttcacatgtcagtataaattataatgattgaaattccgagtctgccatgcttatctgctctgtctgcttggataccaatagcaaacacagctctctctttcaggtatctgagataatggtatattacttacaaattagtcaatcatcctaggcaatttttcccagaaacactctttaacatagcaagacccttgctagattcaaccatggtcttttgttgacgctcgagctagttgaacatcagggcagtcagattgtcagaccccaggctcactgtcccatagctaagcatgaccttccaaagtaatttgatgggctggaagatacaggtcactggtgcagtgctagccttgagttcaaacactaacaccaaaaaaatgtatttattaatataataaaatagagttatacttaaagtattaaactgattcatttaatgtcactggcagcgaaaacgcatgccaagacactgttccctgtgtgctcctatctaaagtaagacatgagaaagtcttcttttcattttgagagtccatgttaaaaaccgttccttaactttgagtgattgtatgtatggcattagtggtacttagggggaaccaagtggatgtagttttttaactgcctggaacctatttaggcttcctgctaattttagacccttttgtctacattatatacacatattgttgtctatttttaccttacgtttgtgccaattgtgacacaaaatatgtctaagaacagactttctttacatacagactaataatccatagtgctgagaatctattggcattataagaagcagactctcttaaggtattcacagcagttctgtccctctccagagacttctatggtgccttaaagttcattgccttttaattttgaagagaactcttaaatggcaaattctaataaagactaattggtaaatgctgtttttcaggaactgttgcttaacagaatttttcacacttgcgagcttttgtggctaggacacaacttggtatctctattgagcaactgatagccttcattacacttttgaaggatgttacttaaaaaaaaaaaacctataaaacaaccccaacaaaacaaaactgcgctgtgggttgttcgtctgtctttttctttttcccctcccttgttttctctcttgttttcctctctcccccttttttttctttctctctttttataatatcaaaaaaaaaagnnnnnnnnnnnnnnnnnnnnccctccctccctccttccctccttccctccttccctcctttcttccttcctttcttccttcatagtctatccctcatctccattctgttcctcatttcagggtctcatagcccagggtggtctagaactcataatctcctgctatagtcttagtctcatattcagctcccaggtactggaatttccaacacacctcaccatgcctggcttgctttcctttcattttggcacctgtccctgctgcattcactattgcttagagcatttactgtaaagattgtggaaaattaagatgtgttctcccctttgactgctggcttgaacgaatagttttgtttctgctcgatcgtatcactactcacagaacagtacaccaatccatgtgattcaacatgattatttgttcatttcgaaaacacaaactacttaaagatgggtggggtggggtgtgggtgacagattgctgctaaccaagggaagacacgagcagagagatgattctcaggactctttttgttgataggacataacttggaattttgaggaaacaaaggctcatgctctgttttgggcttgctcaggctgagcatgatctttcctcagactaccaaagaatgaggcttaatgagatctagactgcactggggtgagagaaacaggctcctctctctgtatgcctccgtcagcccagcgtgatggtgaagtggagtggtgccattgggaaggagaagtggttttaagctctgttggaaagctctgtcctaaccacatccatctctatgaccgtcacatttgaaacccttctgagacctttatgaaagccacactgtggacattctgctttaaaaggaaaagactcatatacatggtgacttttccacttccgccttatttttagcatccaattaatgtttcctaaatgagtttaattttccagtttggggttggctatagttttcttagatgctgatttaggcaacaattatttgtacttgagcttattaattggcatactgttccccctgctgcctcactgccagctgctggtcactctttcttcatacaatctgagcagagtctttttttttttctttctttttttaacaaatgcaatagaacacctttacaaagggatcattaagcagttcctaatctgggatttctttttctttttcttttttttttgtctgaaagttcaggaaggaaaagactgctagtgtatggcagaagggaaaatctgcctcattttggtgaattgcacagtctgttctttcgtgatgcaaacacattcccttatttccatttaatttctatccaaaacaatggtgacaaaggatcctattgtgacgttgaaaagagagaactgtaagcctggtttaaaccaggacacagggaattcacaacatgaaggctgttgctgttgctctttctttatgccttagatttgaaaggtgcgtttagaagtcatatatttatgaactctctctctctctctctctctctctctctctctctctctctctctctctctctctctcctctttgtgtgtgtgtatgtgtgtgtgtgtgtctaagtgtgtaagccagtttaagactcagcactaacaataggattctgttttggtggcaggtggcccggcgttggggcattcagaagaacaggccggcgatgaactatgacaaacttagtcgttctctccgctattattatgagaagggaatcatgcaaaaggtgagatgatgattcattaaagctcactgtgacggtgcccattggtctccacgtcatatttttagagagcacattatcagggctttgcttcagtcaggctttcccccatgctgacacaacttggctcctgcttaggatatcaggactctatttataacttcatggacattggacataaatgtatagtggtatctaccaaatgacaatctttctggaagctttcactttgctacacatggtaaacaggtaatttcagtattgatactggatctccaggtctctaaaggctgtaattttattgtacctcagagtcacacatttttgaaatgcttgttttttttttcttgttctatttcttttttgcccctaccttcctttggttttttaagacagggtttccctacagagccctagctgtcctggaactcactctgtagaccaggctggctttgaactcagaaatccacctgcctctgctcccaggagctgggattaaaggcatgcgccaccaccacccggatctcttgttctggttcttaaaacactcaggcagcccttgttcttattagaaaaagaaaaaaaattttttttcttgctagatatcttgccttatctcatcacttgacagtttactatcccaaactacttgcctgaaataaatgtttcatcttatttggttcatagaacaaagttcaatatattttaattcaaatgagcttttaatatttaaaagttcttttgcataaaatacaaaaacatggataaagataaaatgtacttaaaatataacatttataaaggaggccatgaataaatgaatatatgaagataaaacatttggatatttgttattatttccttcagccttgtgtggtctgtggcttatatagccctacatgtagatatgaatcctgcatggaatggactttgcggatgccactgtttggtactaggaagggaggttgtttatcacaccaacgtgcaaaacttggagtctgcatgtagctagtaaccaatcagggccccttagactcttagcaagttctcttagcctccttataagcacagtgtgctattttaagaaacattcatgacttctatgagacttctttctagaatgttctgcctgtttcatgatatctcttgctatgggtatcgactatcctcatggcaaagtaaattgtagcatagtttattcagaggaactctgtgtctccccattttattacataaaaatatataatggggaattacattcaagtctgtatgaccatatttgctcattggcttaaaaccttaattaggcacttgtgctgtgtgaaaagagcagttgaattagaagcctgaagagtaaaataaaaataaccaaatgggttaatgcaaatgaaacattataaatggttattaatttccatatttctgaaatagaaatgaatgctgaaaaatgtttattgtacttcgtagataaaatatgtgcacatcttgttaaacatgtagcaatgcttagaatacttaagcaatacataaaatatttaagtattactatactaatatagtaatgtttgtattctgcataatacaattatgtttgcttcttttgcttatcatctatatttgatattttatttatttaatttaatattcatacataaatataatttatttgggtcaaatatacccctattccttctccttcaaattttagaaaaaattattatatttatttatttacttatttatttagtggtgtgtgtgtgtgtgtgtgtgtgtgtgtgtgtgtgtgtgtaccaccagtgtatgtgtgcaagtcagatgataccttgcagtaatcaagcttgactttccaatctgtgggtcccaggtgtcgaattctggttgtcaggtttggtgtcaagtacccttgctgaaccatcttgaaaatttaaaagttgaaatgtaatttaaatatctgtctgggctttatttgacagatctacctccctgtttacttctgatatgttcctccacaaaatccctgtgttttgtcacctcactgttgcctttagctttacctaataacctacagggcttcttacaccacaactgtatcactaaccaaggagggcatcattcactctgtttgtatgtcagctttaacggggtggaaagtatggaggtagcatgaaagtgttccctcacaggaaactagaaggaagtagaaagcagaagttcctacgatatttgatgatttctgctgcatattgtacatttaaattcctcatgatgaaatcgttctcacttattacattgcttctaagtgaagacaaccccaacatgtcaaacgtgtcagacaaaacaggtgcactccctaaagcaaacaattctttttctgtagccccaaactaaacagagtgggctatagaagactcagaggcatgctgaatacagcatttattttaccttcgtttcctgaaagtagtttgaaaaatagggaagaacggaaacaaaactaagatatattctgtatatctcagcttttgtctgaaactgcctggtttttactttgggactcacttcattacttcattccgtgtgtgtgtctgtgtgtgtgtgtctgtgtgtgtgtgtgtgtgtgtgtgtgtgtgtgtgtgtgtgtgtgtgtgtgaatgtgtgtatgtaatgaggtctaaaggaggagagttaactaggtgtctccatttgctttgaactgtgctagagtttttctatgcatcacagctggccttccaaggagcccttcctgtttcaatttcacaagacaaggaactgaagagcagtttaagaaacatgtccagattcataaacatctctcggggttggctctttcaaacctctagatatccagattacttggactctaatgtggctccttttacttaaattcagggcaacaaatattctaactctgagtccagagcagcagactccttggcagtcattccttgtctcccaaacatgcacagagagtttataaactgtgagcacactgcttccccatgtcacaaatcaactagcaagaccttttgacacagaaacaggagatggtggattggtttcagctatctgaagttgtgagctatgtacacacacacacacacacacacacacacacacacagagagagagagagagagagagagagagagagagagagagagagagagagagagagagagaactgtcactgtcacacttcacacagggaactgcctttgttccccatagatcccctgggtcttgagttccttagcgttgtctattaatggcagatacatctgtctctctctttccattgtttatcagtttctacagaagcattactcttcacaacttaagtttggggcatgtctttctctacaaattgtgctacatctcctttatttcaggcgcttgacacatttccttttctcatttcctcccttcccagtgtgtattttagattcctttcactttttttttacgcctcttacttcaatttgacactttacacacatccttaagtttcatctaacgtatcttgctttcattttaaaaagtgatgtgctcaggataatgttcttctgctccatccttcatttaaataaggctatgtatctttgggactttcttagatggagggtacacagtaccagaggaagatgcaggaaaaagaagcagtgcatcctgggtatcagtgatcactactctactcttaggaataaaacacatttttttttcttttaaaacttgaaagttgtagaaatataatagtaagggaaagataaatcttaaagagattttccaaagcatagatgttacctttaaaacaaataacaacaaaaaaaccttcaatgtgaattgcttacattatatcattgatttttctcccaccaatgacagtgtaaatgcatctttatgttaaaaaggcaaaaacaactgctgattttcttagtttttcttagaattaattattactgtagctcaacattttgtatttcccttcattgaagcatggcttatttcacaaagtaaggactcttcccccatgaagatgtgtctattacttagttgcatagtctcttctggcctccatttctgctgatctgttaattcatgtttgtttctctttcccttactcctgtggccttttctgtgatattctcaggtggctggagaaagatacgtgtacaaatttgtgtgtgacccggaagcccttttctctatggcctttccggataaccagcgcccactgctgaagacggacatggaacgtcacatcaacgaagaggacacagtgcctctgtctcactttgatgagagcatgacctacatgcccgaagggggctgctgcaaccctcacccctacaacgaaggatacgtgtactaacatgagtaacccgtcaagcaaggcaccccgtgcttcgcctctttttttttcaagatgcagagaatcaccgaattctcttcgatgtttgttttatttctgttgtttgtactttattttttaaatgataatacaaaagggggcttttcctgttgcattattctatggtctgccatggactgcgcactttatttgctggtgggcgggagtaatctagacattcattctttgtaacaggaagatggcggatgagtgggcagaaggagctgagggattcctttttgcttaggcttggaatggagtcctacaggttttctgtatgatgatgctatatcatatttgttcgatttcataataacgtaagataattttccctgggtatctacggtacagttgatttcacgttgtgtaaatatcttcttggagaccatttgccttgggcatttcccccatcattactgagtctctgcaggtgtacaaaaatctactgtaaatggcagtttaatgttagaaattactgttttgcacctcttgtaaaaaaaaaatatttagcaattgcatttgttgttctttctgtttcataatgctttacagatgacttgtagaggaaaaccctaaatgtgggcaattctctctgaagttgagtaatcaccatgactgtaaatgagggccaccgttttggactctggctccaactgagtcacaggccagtagcattttatgtatctggtgccatcctgctgttttggtactacaaatactgtcttttaaatatgttgatgcccatctcacttaaataatgacatgtcatgatccttcggaatcttcatttaagtgttaaagctgggatcacaatgaagcaaaaaatagaaaaagaaaaaaaaattacctgtctcctttcactatcttcagtacataaatacattatttaatcagtaagaattaactgtactaaatcacatatgatgctgttctagttacagcaagcactctttaagaaaaatatccactacactaaataggtactatagtaatttttagacatggtacccattgatatgcatttaaatgtttcactgctgtgttctgttgataacatatataaatattagataatgctaatgcttccgctgctgtcctttctgtaatattctctcatgctgaatttattatgaccatttataagcaatgcagttaactacagatagcatttcaggacaaaatagatgactcaaaccatttatggcttaaaaaaatagcttaccaccttgctatgctataagcagcttctatgcacattgacaaacgaagagtgagcctcagcttgctaaaggaaactggggaaacttttgtaacttttggtgaaatggaacattgtttatgaactgttaaagaatatgaggaagttcctgtgtgacatagtgctggcactgatgttgtccttcatctcctttggacacacctgtaaatgtgatcagattgtacgaaagacgattcaaagatctgaaatctcaaagtttctgccttgttttcattttgtttgctgttcgtttggtttattgtccatccgaaaatgacagcattgagcgtgtgccttgctgtttcattcactctgaaaaccataaggaaatggtgtctaaataccccctgagtagctgcttaccagatccaagcaaagaaaatgaattgtgttcacttcgttactactctggaagaacagcttcataaagagcctataggaaaacactatttcttagaaaaccattaaagaccaaataaacccagggaagcagttcaccagcacaagaaagaacttgtgaagacgagccctcagtatccttcccccaccccccaaccctctgcagatcacagttgtttccgtaacataactgtcccttcacttactctccccatgcacaaatgggcactatccacatcctccagaaatattctgatccctgcagatgtctataaatgattccctcgactgtgctgcatgtgtttcttctggcccttcatgggctgataagtatgccttaaaaatcaggacagccaccatgaccatgtggctttttacagcacttggactttctaagtaaccagcgaagtatttattggatagacacccaagattgagctcttggtaaaatagaaaaattctaagtgtggattgacatgtaaatcatattcaggagccttttctctgtctatagttcttcccctatccttttaatattcttgtcctagtcaatcagagaggaaaatttggactctgacttactctaacggatcaaaagagggatggtattaattttgatgtataaggaaaactatatgttttattgcaataggtagtgtttaaatggactctgtaaatcgtcagctagcattaagtatttctaatatgaaaaatttcaaaatataacaccataaagtgtagaaaaacagattttatgttctgatttcttccttttctttctccttccttccttccttccttcctttccttacttcctgccttccttccttccttcctccctccnnnnnnnnnnnnnnnnnnnntccctccctccctccctccctccctccctccctctctctctctctttctttctttctttctttctttctttctttctttctttctttctttctttttttagattgattaaaaaaatcaagttcctgatgtttgcaagagtcttgcattttgtatttcaacagcattggctacaaagcataggaattagtaaagtagtcatttttttcaacttgataaaagaaatggaaagctacatctactagtgtttgatgtctctagttgaacatctgcatatatccaatcatttctttaaacaaaggatgttaccttccaaatatgtcatgagaaattattttcttaaggggtacttcaaaagcaaaatccacaaaactgagtatgtagtatttcttaaaaccacagaagacttgcttcctgtagatgctataacaaatttctcagacttgagtaacaatacaaatgtcctgtcttacaatcctggaggtcaaaatttcaaagtcagccttagagggctaaaactaagatgctaggaacagcaactcattttgaaggctccagagaagccttgttttttccattttctgaggctatataacaacatttcaattttgcctccctgtttatgcccctttctctgcactcacagatctttctagcttcctgcaagaacacataggatgatatttagggtttacatagaaaacccaggttgatcttccccttctcagcctcctcacttatgctgtttgtaccttttaacagataaacaattcataggttcttgggttataatgtagctatggggaagatctgggaaaggctatttattcagtcttattcagtttcccacatagccaaagaccccagagagcaaaatgctaattgatttattcatggaaaaaagttctaagattagtacatactaagggatattgtcatgtaccattcaaatttccccttactttgcataaatacttttaaaaaagtacctcagtataaaaattctcctattctagtaaaccatctggattatcacatcaaacctttatatgatttaaatatccctcctctcctggttaaacacgttatggtaggaaaaatagctaacctgtgataacagcaatagcaccattaaatctgatgctcctgccatagtatgtttttgcaaagaatttctttaacatcaatgagttcattctctatgattgtcagatctgcaaatgataactgcttatcagtaagaataataaacagaatatgctcttgttaattaaaggaacaattctaaaaactgacttgatttctttttatactgaagtgaaaaatatttcttgactgatatcacagtgtttgcaccagattatagggttccaaactgaatcatgtttttgattgtgcagcctttccagattatataatgatgaaacatattggaaaaaaattgaatgcttagttgagtccttaattttttttaaaaaaaatctgacacaaataagctattttccaggtgcagtttggcatggacaagagatattaaaagtaggcaaaaaatggaaagaatcaatttaaagaaggcagatttgtatgttggacaattgcaacaagaatttcatagaagtcaagttccataaaggtatttatgttgcattcagtactaaagacatagataagtggtgcctaggaggatagagagagggtggctgcttttgagttctttggaaagctgaccaaatttaatgagaactcaactactctttttaggactttattttattttattttattaaatgaaactgacttagacactttaaaaaatatggaaaagtctagtttaagaagaaaaatctgattagattagtgggtgcctttataaaaatattgatggttttggaatgctcaatgaaaatgtatatacaatagctgtggtttaagaattcatatataaggtaggttttctttccgcttatgaactccaatattcttacttagttccatttgaaaattatgttactatgggaagattttctttaagtttgcttggttgtattaaaattataattatagtttcagaaagcattatgaaattcatgtggtgatagcaaactaaatatggtcaaaatttaagtctaaaataaaagcccagaaattgaaaatattgggttgtcgtgatcactcagtatggttgcacattcataccctgtgaatgccatctcagtgctgactgcctcttaattagttacagtttgaataatttatgaccaaactaataattctacactgtggtcctttcttcttcctcttattttctgaaggatttagatatcatgacacttaatacatttttccagttgtgttccaatttctttagatatatttcattaaatctcaagaaatgtgttgaggaggaaaaaaaaaaaacagaatttgggagactcaacaagggcatgtgacttgtctatactgcctcggctgtgacttgaattgtctaatgagctgacaaactaacaaatgtcattgtgttgagatgtcaggagcttacaagtagattcataacttggatgcagctgtgctctcgatttagcttctcatgataaaaactcctattaccattacgttttgctgaaccagtctttagtcggctgctccgtctgacctttggaacactctttgtagaaaagctaagaagtgaataacgcaccatttacaacaacagtcaagacaaatggaaatgagcaaagttccttttgattcctttccactggagaaaattccagactaattttcaccaaagaaatccatgtatagattctactcttcagtaagctgaacacattgcatagttagttgaaaggaaaacgggaatctttagaaaacttctgaagtaaaacggggtcggtcccatgatttagaaaacacagaagtggctaaagagcaaaatggaacaaaaccaggaagtgttatataaacatatctcaattattatgtcttatttctgttaaacgagtagcaacagcgtcatgtacaggttaatattccaagttgcttgtaaaaccatcatagaaatttacaatgatggtgaaaataaaaaaaaaagataatgtgtgtgactggacttttcgatctgaaaaaatgcaatcttgtttattcgggaaccaagcatgggcctggcacttgcaaggcaaggctttatttagtgttactactggctacactcccctcaacactgctatttcattggtaatgggccgcagaaatgttttctttgttttaaaaatagttttcaaacttaaatttaagcaaaattttccatactttgtgaaaatttggtatgttgcattcatggctaaatctacttgcttgataacatcctagcatccactgtcaataatattcagagtagtgtataaccactcattttcaaaatgttttcatttttcttagtcatggttttagttagggcttttttttctccccctctcgcctgtcgtcttctttttcttctccctccctttccttctcttttttctcctttattcctctcttcccccccctcttttctttcccattcccttccttctcttctatttccttctctcttctctccctgtttctctttattacacctattataatctcctctcccccctcctttctttcttctttttcaattttttccctctccttattttcctctttctcatgaatnnnnnnnnnnnnnnnnnnnnccaccatgaccaaggcatctcttataagaacaacatttaattggggctgacttccagggtcagaggttcagtccactatcatcacagtgggaccatggcagtgtccaggcaggcactgtgcagaaggggctgagaggtcaaaatcttcatctggaggctgctagaagaaatctgacttccagacagctaggacaaggccattaaacgccaagcccacagtgacacacctactccaacaaagccacacctccaaatagtgccactccctgaggcaagcatatacaaaccaccacagtcatagtatttaatatattccgggtgatacttacttttgaattaggatctgaaatataaaggtattgcaactttatgctgtattttaaatttcgattgtggttaatttactagtaggttggcttgaactttatatatatatttgatgtctttattaaaaaataaaaatgtctacataggccaataatcataccaaggaaaataaagtatatttaaatagtcagctaattgagcatttttaaacaactcagtctatacaacactagcaaatacaaacacactataaatacatactataaataaataaaaaaacatactataaatacaaacaacactagcaaatacaaacagttccttcaaacaaatcacatttggtctagtgagatggctcagcagatagaagcccctgctaccaagccagattacctcagctcaaacttcagaatttacaggattgaaggaaagatctgactccttcaaggtgtactatgaccttcatgcatgtgctgtgggacacatgcacctctgacactccaaatggatggatggatggatgcatggatggatagatagatagatagatagatagatagatagatagatgatagatagatagatgatagatagatagacagatagatagatgcatagacttaaataaaagtaatttatagtttgacaataacaaaatgaccttttgctttcatctttctttagtctgaattgaaagactgttattaaaaacaaattctagagtataggtaagctctctaagatactggtactgtagataacatatttaaaagaaacaatttcaaagcacacatttttgggctatcatgtaatgaatctgaaatttggccattgggagaataataggcaagctttctctaccctttatgtttttctttaagcactaaggactttctaaattaaagcatgatgaatgctgtatttcctctaactttccaattgtcttctttaattttttttctaaatctgttagcaagaagacaaactgatttaagaacaagagagtgtggatttggttcattaatgaaaaagaagttttctaaaaatatcagatttctatatcatattttctttctccttaaatatctttaatattcttttcctgtgtttatttattcttatataatttcatacagtatattttacttatattcttttttgtcgtccccccccccaaccaccctagatcgtttcactcaacttcatattttttatctcttaaaataaaaaacaaatggccactaaaatgacatggagtcatttgtgttggccatactacatcatgaggcttgccctggagcatggttaatatgcccagtgacactccactcaagtaaaccgatgttccatctcccagtagctgtcaattgcaaatatcttcttggctggggtgagactatgttcatgctgaaattccccttcttcatgctgaaatttttgtctgtcttaagtcttcctcatcttgtgaggaggtctctgtgagtccatttgtgcacctgccctgttgtgtctggataatgttgtttccttgaagtcatccatcatccttggatcttagtctttctgtgtgacccccacctctgcccttctgcctagatccctgagatctgaagggagggatatgataaagagccctccaaagttacttactccaaacatcatctagttgtgaatggctatcatgcatatctttatttgcagctgaggaagtaaacataacaattaaccaaaatattgtcattcagacagatttgcatgcttgcctctgaagttcactatcgagaatactatgaaaaccaatcagttataaaaagatttcactctacaacatcttttgtggttcaatactttagtcctttgggattgtgtacagaaagactgttacttcagttttactagggtggactttagattatttgtttcagtttgttctgtgttatgaaatccatgtatccaacccttcaatttccccacatgtgagtcttctaaaaattaacattgaacacttgcataaaatcaattcaattgcatgagtattttgtccaaattaaatttctcccatgtaagatagatttatagaaaactatccttttcctaagactaaatagaactaaacaataaaaatctatcacagagatgagtataaattggaacacatcgtgtagtactgactgtatctgagactctacaaaagaagtaatttaatgctatctagcaatagaacagaataattttattcaaataaatttgtaagtttaatatcgcccattgttatgacataaagcagttagctaatcactaactacaaatgcacatggtatataatgtacagaattagaagatttaagaatcaaagcagtgcagacttattaacttctggactacactgattaaaaacatttacaagtgccctctctgagcatgtgcacagactagattccttactgtgcagtgagaggttgttgtgttattctgtgttcctagctctaagcaacagtaaccaactggtatagaaattgtcaaagcccaggctctcttttgtagagagggtggctattttgggtatatcacctaacaactggcctcttaccctgagtctaacactgacacccacaaagggccatagagatgagtcacaagatcctacccagcagtgatggatttcagaccttgatctttctgtccactgacctgactgatagcaggaaactcaagttgatatctgcctgtgtcccttccttgtgtggaatactgttcttctgcctgagactatctcagcttacacacctgcccctatactgtgtccaattttactctcagtgtttggaaaaatcaactcttcacctgtagccagtcaaaaagcctatcaaaaatgttccgtttgaggattccttgagggaaaatttttacactactgttccagagcaagtaaccttgaaaagagaattttctaactctgataaaattaacctgtttctcccttccatatatggtagcccataacaattatcatggatttagttttcatgaatttgataattcaagatatactatcagaaaagggattgtaaaatgtaggaattagaggcataaacatttaagaatgaagacagatcaaggtactttatcatgcacttctggctatcatagtccttactgcaccgatgaagaccgtttctccgctcttaacctcataagagtgactttatctttaaatcctgtgtggcaatccctgacacacctccattatgaccaaagaagacagagcagcctggaagtccaaataatttcttcaggttatccaacatttgcaagtctgtggtgctgctgggccagaaaatcatggtgtgcaaggccttcctaagcatctggcaaacaactgagctctgcagaaactgttgcctcatatacaggggttggggcctttgtgttcaccaaggagaatctccccaagattagccacatgtcattggccaataagagtccagctgacacctgtgctggtgccatagcactgcgtgaggttactatgccagaacactggtgtgggacttgagaacacttcttctttccaggctttagtcactactagtaaagtttccagggacaccactgaaattctgagtgatgaaattgtgagtgattttaacagtgaaattctgataaaaactggagacagcgtggaagccagtgaagccacactgctgaatatgttgaccatctccctctgatcatcgagcagatatttgacaacggtagcacttgcaacacggaagtgcttgacgtcacgaagtaggctgcgcttttgattcctagcaggtgtctgaaatgttggcagtgtttgtctgcggattggtttgcaacttgttgacttaataccagcttaatttgagaaatctgaaaataaaggcttacttttcctggaggaggatgaagataagggaaggagaaaggagagaaagatggaggaggggaggagggggaggaggnnnnnnnnnnnnnnnnnnnnaaagggatcattaagcagttcctaatctgggatttctttttctttttcttttttttttgtctgaaagttcaggaaggaaaagactgctagtgtatggcagaagggaaaatctgcctcattttggtgaattgcacagtctgttctttcgtgatgcaaacacattcccttatttccatttaatttctatccaaaacaatggtgacaaaggatcctattgtgacgttgaaaagagagaactgtaagcctggtttaaaccaggacacagggaattcacaacatgaaggctgttgctgttgctctttctttatgccttagatttgaaaggtgcgtttaagggggaggaggaggaggaggacttcacacattaaactgaatacaagttaaggtatatggattctggatatatcctccataaaaatgaggagaggttctctctctctctctctctctctctctctctctctctctctctctctcttttaggaaggaaaaaaagcttactagagcaacagcaattagaggacacaacttttagaagttacaataatttagctttaaaaaacatggctttaggaaataataaagtctacttaggttccta

SEQ ID NO: 294 - DNA, 2852 bp, Mus musculus
cagctctgtcagaggcgctttcggcttccaaggggaagtgctgggcaataattaatgtttttattaaatttggagggaattttttgcagccgttcgcctagcgtggccttcaggttgatagaagtccagatcccgaggaaatctccagctaaatgctcaaaatataaaacactgagctaatatttgcgaagaggagcagaatggatggattttatgaccagcaagtgccttacgtggtcaccaacagtcagcgtgggagaaactgtaccgagaaaccaacaaatgtcaggaaaagaaaattcattaacagagatctggctcatgattcagaagaactctttcaagatctgagtcagttacaagaaacatggcttgctgaagctcaggtacctgacaatgatgagcagtttgttccagactatcaggctgaaagtttggcttttcatggcctcccactgaaaatcaagaaagaaccccacagcccatgttcagaactcgggtctgcttgcagtcaagagcagccctttaaattcagctatggagaaaagtgcctgtacaatgtcagtgcctatgatcagaagccacaagtgggaatgaggccctccaatcccccgacaccatccagcactccagtgtccccactacaccatgcatctccaaacacagctcatactccgaaacctgaccgggccttcccagctcacctccctccttctcagtccataccagacagcacctaccccatggaccacagatttcgccgccagctttctgaaccctgtaattcttttcctcctttgccgacaatgccaagggaagggcgtcctatgtaccaacgccagatgtctgagccaaacatccccttcccaccacaaggctttaagcaggagtaccacgacccagtctatgaacataccaccatggttggcggtgcagccagccaaagcttcccccctcctttgatgatcaaacaggaacccagagattttgcatatgactcagaagtgcctagctgccactccatttatatgaggcaagaaggcttcctggctcatccaagcagaacagaagctgcatgtttgagaagggtcccaggcagttctatgatgacacctgtgtggtcccggagaagttcgatggggacattaagcaagagcctggaatgtaccgggaaggacccacgtaccagaggcgaggatccctccagctctggcagtttttggtagctcttctggatgacccttcaaattctcatttcattgcctggactggacgaggcatggaatttaaactgattgagcccgaagaggtggcccggcgttggggcattcagaagaacaggccggcgatgaactatgacaaacttagtcgttctctccgctattattatgagaagggaatcatgcaaaaggtggctggagaaagatacgtgtacaaatttgtgtgtgacccggaagcccttttctctatggcctttccggataaccagcgcccactgctgaagacggacatggaacgtcacatcaacgaagaggacacagtgcctctgtctcactttgatgagagcatgacctacatgcccgaagggggctgctgcaaccctcacccctacaacgaaggatacgtgtactaacatgagtaacccgtcaagcaaggcaccccgtgcttcgcctctttttttttcaagatgcagagaatcaccgaattctcttcgatgtttgttttatttctgttgtttgtactttattttttaaatgataatacaaaagggggcttttcctgttgcattattctatggtctgccatggactgcgcactttatttgctggtgggcgggagtaatctagacattcattctttgtaacaggaagatggcggatgagtgggcagaaggagctgagggattcctttttgcttaggcttggaatggagtcctacaggttttctgtatgatgatgctatatcatatttgttcgatttcataataacgtaagataattttccctgggtatctacggtacagttgatttcacgttgtgtaaatatcttcttggagaccatttgccttgggcatttcccccatcattactgagtctctgcaggtgtacaaaaatctactgtaaatggcagtttaatgttagaaattactgttttgcacctcttgtaaaaaaaaaatatttagcaattgcatttgttgttctttctgtttcataatgctttacagatgacttgtagaggaaaaccctaaatgtgggcaattctctctgaagttgagtaatcaccatgactgtaaatgagggccaccgttttggactctggctccaactgagtcacaggccagtagcattttatgtatctggtgccatcctgctgttttggtactacaaatactgtcttttaaatatgttgatgcccatctcacttaaataatgacatgtcatgatccttcggaatcttcatttaagtgttaaagctgggatcacaatgaagcaaaaaatagaaaaagaaaaaaaaattacctgtctcctttcactatcttcagtacataaatacattatttaatcagtaagaattaactgtactaaatcacatatgatgctgttctagttacagcaagcactctttaagaaaaatatccactacactaaataggtactatagtaatttttagacatggtacccattgatatgcatttaaatgtttcactgctgtgttctgttgataacatatataaatattagataatgctaatgcttccgctgctgtcctttctgtaatattctctcatgctgaatttattatgaccatttataagcaatgcagttaactacagatagcatttcaggacaaa

SEQ ID NO: 295 - protein, 350 aa, Mus musculus
NTELIFAKRSRMDGFYDQQVPYVVTNSQRGRNCTEKPTNVRKRKFINRDLAHDSEELFQDLSQLQETWLAEAQVPDNDEQFVPDYQAESLAFHGLPLKIKKEPHSPCSELGSACSQEQPFKFSYGEKCLYNVSAYDQKPQVGMRPSNPPTPSSTPVSPLHHDNTAHTPKPDRAFPAHLPPSQSIPDSTYPMDHRFRRQLSEPCNSFPPLPTMPREGRPMYQRQMSEPNIPFPPQGFKQEYHDPVYEHTTMVGGAASQSFPPPLMIKQEPRDFAYDSEVPSCHSIYMRQEGFLAHPSRTEAACLRRVPGSSMMTPVWSRRSSMGTLSKSLECTGKDPRTRGEDPSSSGSFW

SEQ ID NO: 296 - DNA, 117829 bp, Homo sapiens
agaggtgtttcgtggttattatgtctctacttttagtttactctctcgatttggtggggggatgttatattatctgtgcattcctaacataatacaatgtgtgcacactgtagatgatcagtgtgaatagagactttaatgtgaagaaataagtttaaacttcagtatagcagatttagttttggtataattaacataacctaaccccaagatgttaattacctaaataaaattgttacttgaagctatggattttctttattttagcagttttaaaaatagtatgcatacttatcaattccatcaacaaatagtcattgaatatcaacaatgtggtaaacattctgctagatgatgagaatacaatcatgaataagataaaatgcctgtcctcctggaagtcataagcctaattgtggaagcaatattgcattaacaaggacagcaaataaatgtattcaatctgtgataggttgaacatcctaaaaagaaacaaggtctttagccagcttctaagatgtccaccaatgatcccagcatcctggtattcacacccttatgaattcacaccccaccttacactgtaagaagattgacctgtgtgatcaataacctatggtagaagtgatggttaagtcacttccaagataagattgcaaaagaccatgggctccatctcgggctctctcagcttattcacacaaggaaggtcatgttgtcagcagccttatgaagaaactcacagagcaaaaagtgaaagtatatggccaaaagtcaacaaggaactgagacctgccaactaccatgagtgagcttagaagcagatttcctagccacagatgactgcagccctactcaacagcttgactactacctcaagagaaaccatgagccagaatctaccagctaattgctcctagattcttgagtcaaggaaactgtaagattataaatgtggattatttaagctcctaaattttgggatagtttgtaactcagtgattgataactaatacagatccttcactgcagatagtttgggaagcaataatttagagtgttcttggccaataaaaagatattcaaggcttaaagatgaattgacaaattcatattaagcatgactctgtgttggaaaataagaagagtagttatgccattgataataaactagatgatctactgatgcctcttcctgttccaagattgaagtatccagaatccaagcactgatatcccccattacatcagaaatgagtcaagtagcaagagctatttataataaatgtcatggccttttcctctattttaactgataacacattattttaagaattctcagtagattttagtaggagtgggtgtgacaacgtgcgtatgtatagaaaagaatatttttgttttaactctaaaagcaaagattatttttaggtcgcatccatacacgtacctgaagtaatggtattctgcttcctgaatgcctttctgaaaatgctgcctgcctttattgactcaaatgttgtcaagcgtgttacatacacatttttcctaaccaagggaagactcttgttcctaaataacttagtttttgggtggatcacttgcttccaaatacatttgataaaccaatgagcattgatgtgatatgacacaatagaaatgagtaattttaacttacaatgtaaaagtgaatcaagaacaaaaatctgagttttatttagagtgtgtcataagatacaaagaagatttgtagctttctttgatgtgctcacatgaaatgcctgtagtcaaacggctatttttaaacttgagaagaaattcaggacaaaaggaacattttaaatataaaagggaattcagggagatcacaaagaagtgaaatcactattacgaaagttcaaagacacattgttcttcaaatatcaagaagctgacttaaataccattggtgacccttattcaggggatactttctagggtttaaggaagtgacagacatgaggccattcttttgcccccttttcagaaactcttggttttggatcactattgtgtttaacttccttaagactaattctcctgttgtgctagacattttgaactcagtgagatctcaactgcaatataattggtatgctgtgtcagacatcaggtcggctgaccaccagagaccaggaagaggactctcatgtggcaatcccctgtctgggcaaagtgagtattgcatatcaggaatttgctcctacacggatgggaagctagaaaatttttctaaacgtaggcgggatgtcaggctattgccagatgtaaaggacagtcctaaaagccatccggaaggtcttatggatagatctcagtgggaacaggccatggaggctgaactagagaggagaggtctatagtcaaatgttagagaaaaagctctaacaaacaagaatggcaacttttacagagtaccaactctgcaaggcaatttcaatacgttagcatatttccttctcacagcaattttggaatataggttttatatccattatccacatgtggaaacagactcagagagatgaagtagtttaaccagtgatggagccagcattcaaatccatgactgtctcatgccaaatcctctttccactacattgtctttttgtttttttccttagtgagctcaacataaccaatgattaaaattaaaaaaaaatcagggatttcttttataatggatcttaagggcaccaagtacacatcctttatttaataagttaaaaaaagagaaagagaaagaaagttcacattagtacaagctatgattctgaattataaacttcagatactctgttggtcacataaataccacacccttagaaatcacaaagaatctgtttctgtgccaaaggaaaaaaaaaaggaaagaaacctacgcattagagaaatgtatttagctcagtacagcttttaattttcttttgataatgattttaagaaaaaactcatttctttttatttttcagctttattgaggtatgattgacaaataaaacttgtatataattaaggtatataacgtgatgttttaatatacattcatgtactgcataacaatcttttagtcaacaacagaccgcatatacaatggtgggctcctaagattacaatggagctgaaaaattcctattgtctagtaggcaaggcatcatagtgcaatgtgatactcacctgtttgtgttgatgccgatataaacaaacctgcggcattgccagtcatgtaaaagtatagcacacacaataacatacagtatataataataataaatgactattactggtttatgtatttgctggaggggcggggccctcagggacaacctcttgctaaggcaatgaagaagggaaatgtggggtcagagcccccacacaaagttcctactagggcactgcctagtggagccatgagaagtggaccacagtcctccagacctcaaaatgttagatccattaccagcttggattgtgtgcctggaaaagctgcagacactcaatgaccgcccatgaaagcagcagagatgggcgctggaccctgcaaagccacagcggtggagctgcccaagaccatggaaacccacctctcacatcagcgtgacctggatgtgacacatggagtcaaaggagatcactttagaactttaaagtttaatgactggtctattggattttggacttgtgtggggcctgtagcccctttgttttggccaatttctcccacttggaaaaggtgtattttacccaatgcctgtacccccattgtatctaggaagtaactaacttgcttttgattttacaggctcataggcaaaagggacttgccttatctcagatgagacttgggacttggacttttgagttaaagctaaaatgagttaagactttaggggactgttgggagggaaggcatgattggttttgaaatgtgaggacatgagatttgggaggggccaggaacagaatgatatgttttggctgtggctctacccaaatctcatcttgaattgtagttcccataatccccatgagtcatgggaggggaccttgtgagaagtaattgaatcatgaggggcgggcttttcctgtactgttcttgtaatagtgaataaagtctcacgagatctgatggttttataaagggaaattcacctgcacactctgtcttttctcccaccatgtaagacctgtcttcactcctccttccccttctgccatgattgtgagggcttcccagctacagggacttgtgagtccattaaacctctttttctttataaattatgcagtctcaggcacttctccatagcagtatgaaaatggactaatactctaatcaaaccgttttttcagaacatatccccatcattaagctattcatgactgtatatacgttgtgaagtgattcgtatgatcaagttaattagcatatccatcactgcacatagttactttttttggggggagagtatggtaagagatctactctcaaaaataagaaaaatcttttaactaaaacttatttgtactcagatattcaggctgttttaattgtccagtatttttgtttgtttgttttcaaaaaagtcatttcccaaaacattgcttaggttaatacttaaagttagtttaaatctgtagagaaaggcagttcgaaagtatgctatccttgcattaattcattcatccaaaaacatgcattaaataccttctatgtgccactgaataagaacacaaggtcctaaaaagtgtatcaaatgaaaaaacagtaacaaatatttatgcagaatataaagctatggagaaatgctagctttgaaagttcacaagacgaggttccctaaggctaatttgaggttcagaactggggaaaaccaacttattccggaaagatcttacagagcagctactttaggcagccaggttggaaatattattcctcttaatggctaatacatataaaacgctaactttattgtttgtgctttaaatcattccaaatcaagttgtaactcaggagaataaaattatctttctaaacaaacttttgtgatgctttttttgtctttgttactaacctgtcttttacatttaaataaaccatagcaaccacacctgcatctctcactgttgtccatgaagtggagattagtgaagtctggtaatgtttcactgtttactttaaagtcaccaaagtcatacttttcattctaaaagaaatgcaaatgatttttttttttttttgaggcagagtctcactctgtcaccaggctgaagtgcagtggcacgatctcagctcactgcaacctccgcctcccgggttcaagcgattctcctgcctcagcctcccaagtagctgggactacaggtgcacgccaccatgcccagctaatttttgtatttttaatagagacagggtttcaccatgttggccaggatggtctagatctcttgaccttgtgatccgcctgcctcagcctcccaaagtgctgggattatagacgtgagccactgtgcccggccaaacgatcgtatttttaaaggcaggtagagattcgtgttttgtttcttgcttattagtttttgcaaactttatatattactcaaaaattaagatctataaccacctagatatattgctgttctataaataaaaatttctgttgtccttgcaaactctaatttgaatgctaataatttatctctaattaattaactctaataaactactgatttcttccttcatgtagtgggttaagaaaaaatacgtctatgaaacttgcatgttgtaacaaaccatttcaagtattagaaaaaaatattatcttttgattcccacttgcaatccaaactattagaaaaatgtaacttagtgtaaaagataagtgtgtatccttccctgccactcatttgatcataaaaattttaatatttataggtaatatagcatcttaaaaaataaaactatagatatatataccttacattgttagtgggggtgatattactcccaagtgttgaaaactggttattggagggatgtatcttaggtgtcataatggtttgtgacactctaaaggactacaggacacaaacagatacacagtaaaactgtggtattaaaatataatgagaaggaggtgataaggaataaacatgtctaaaaaagctccttggggacaataacaaaaaaaaggttgtgaatacatatatatgtgtaagtgtatatacacacctttatgtacactattttttctttttaacgaaaacagaatatatggtactgtatattctgtctcttgcttttattatcattcaatacgctatgtcacatgtaaatcatagttgcatgcaaatcatttcagaggtaaggtaggtaacatcaacaagacaaacagggtttggggaagaatgtagaccatggcaaaactgtgagcccatgcttcttcatgaggaacatcagctcctttacatcagctccagctcatggttgctatgtgggaatttaggcccagtgttaccatattctctaatttttcaagcaatggaagtctaaatttttgtgtataatatgaattttgaatgttgacaataactttcccttgagggtcaacattatgtgggtcaagcaaaacaggtctggactagcacacaatgctggcttccttttggacttgtgaggtagaagttcaactcacgatttttcaaagaaatgttgacatactaactgcaacacaacctcctgcaacagaattcccacgtgatttgctcaagcctacggaatcagaaactctatgaatccacccagggatgtcactttttaacaaggagtgtcttatataatctcaaatttgagaaccaaccatatagcatactttttaacaggtatataatgataattgaattccaaactataagagtatcatactttgtcaaatccatttccttattggtggatactgaagttgctgccagattttttccttggtacctaatatttcaataaatgtcttcatgcaccattgcttttatttttgtagtatagatttcccaaatgaggattattggatataattttagggtctaatagatgttcattttaaagtctagtagacattgtaagcttaccttcaaaaggtttcaaaaagtcacattccaaccagcaatatacatgagtgcccttatcctaggatccaactctaagtatattagaaacttccttccaaattgatgagttaaaacattctttaaggcagggcgcggtggctcatgcctgtaatcctagcactttgggaggccaaggtgggcggatcacaaggtcaggatttgagaccagcctgaccaatatggtgaaaccccatctctactaaaaatacaaaaatcagctgggcatggtggcgggcacctgtactcccagctacttgggaggctgaggcaggagaatcacttgaacccaggaggtagaggttgcagtgagccgagatcgcgccactgcacttcagcctgggtgacagagcaagactctgtctcaaaataaataaataaataaataaataaataaataaataaataataaaaataaaaaaattctttattttttaagtgtacagtataatgtactgatttggggtgcagttaaaagtttttttttccacatttataagttgtttgcaattcctctacttgagggagtttacagatagtcaccagctgaaaatggcagtattgagagtgagagagtatacagctacatagtatcagtttccttgatacccttaccttcttcccaggctccaccctcctctcaaatttctgctactcctcacatacagtgttcctgaagccactgattatctttcaccctcctgtgaggactctatgttctcctttggaattattttcacttgttcattttcttggccaattttgctgtttaattttatatctttttcttatctatttgatgtaactgtgcaaactagatctttaacaatttgccttacatactgttttaatacaacaaattttaaaagttactgttttacttaatactctactcaattttgagcaaacttcatttgattttaattatagcaaccatttaaaacaagcagcgccattttagcttgttgcctttctgtaactgcttttagaaattcactttctttaacaacgtgcaatttcttcataatgccatagtaagttaactgtagagaagtcactaatgaatattattttactttattaaataacagcaagggaaatataaaaatttaaatagttttacatgcaacctaaaaactttccaaactcaaaaatggacttttttttggaggggggtagctttctctcaagaactcttatttcaaaatccaaatgggatttcaaaatacaagcaaataaatgtcaaagcctcttggcctctgctctgccattctatgcctgaaatcctgccaaaatgaaattttccgttcaaaagggctggcatttactaaactgatgttttaaagacattctcaaaaagtagtggaaactttgtccagctttttatgttcctgtcttgtagacagaacagctgcctttgcagatattttccaagatcttacattttctgaaaaacaaattttcagcccttccactgtcttcagcaagtgggtctattggtttttcccagtgccaagcagagaagataaacaactgccaaactagaagctagtgtctgagtatcaaggcatagaaaggacagaagagatagtgtttcagtaagtatcaatgcagagaaaggacagaagagaaagtgggagaaagaaaagagggtggttcaatcgttcacagtcaagagggacacatttatctcaaaattttaggctgtttcaacaaaaccgagctgtagcgagactagctgcttattcacacgagaacatcattttcagttactatgaagatcaaagagttaaaagatatgagttcgtttaaagaactcaaaagggaaaatatgaagccaccgcaatacgtagtaaaatctgaggcttaacagcgcagcgcctgagagtgccagtccactaaagggagggagaaggggcgcagagcttatgggggcctgggaaggagtgataagtctttggaaatggaaactaaagctatcagccagcgaaaaccatcaatattcctaaaaatatataatactaataatacataaaagctttaaaaaactaacaagacactgtgggatacaaaaaaaggtagaaatgaaaattacagaatgttaagtgaaaaaactgaaatccatctacagtcgaacagtttgcacctttaaaagcaatgacttgaagcagcaagcaaaagttcccagtccttaagactttctccccactctcaattctttctttcctctagtgcaaaagctgtctaagcagtgcacgccggaattatccccacgtgagccttcctttaatttcggtcttaatttttttctctcttgttattactcccagaccccaacctctttttcctcatctagtatctgtttcagggacaggacaaagaggaggcagcgagctgaaaaaagttttgtggtttgggatacttgggcctttgttgtgtcatttcctctacccctccacgcccccaaccacgtgaccaagaagggccggaattttgtgaatggagacgaaaggtggctgttggggcgggcgggactccgcccccttccctaaagcggccaatctcctagcggagcgctgaggggtcagcaataaacaacaatgggctggggatttacggctcgttattggctgcgggaagaacctcgccgggacctaacccgaagctccgccccctcgcggttaccctggatacccgtcaggctcgggctgcagagaaggtctttggaaactgttgctcagattacaggcgctgggttattccaggagtgcagggtggtggaggacccttgttattgaccccctgcttggttgcaccctcagatagtacccatgagcttcactgttcagcctcggggcccaggcgcttcctggaatctctccttggccggggttaaaatgcagttcccgctcaaaatgcttataggtgcgcgcgttgtgaactccgatttagtagtttccgggaatgcgcggggtctgtctttgctgtccatagttattggttgttttcccagtaataagtgttgattgtttgtttgtttgcttcttttttaagtagatctttctcctgcccaggtccggggttgagtgctgtgcgctcttacactccattttaatgtgtctccataacgttctatttaaggaaggaaactttcaaatagaaattgagaactgcagcacgtttcctaacgggcggaacagctgccggaaacgtcttttggtcactagttctggtcacaaatgaatttcaacagcattgagtccctggtcctatccccgcggcctcccgtccgctgttggacactggctccttaaagtgacgctttactgttctgagtcccataggaggatcagggcaagtggcttcagagatgcagccctcactgcttaacgtcctagttattgtccttgaaacccgagccatctcaccgctcgcccccaaccctgggctctggctgtttaaaagctggagaggaagtgaaagcgtcaagtacagtaagtgacaccctccgcctccgtgtatacataacaaaagctcaggaaacgtgcgggttctaggatatacgagcaaccccaagcactccctcctcctccccacagccacagtggactggaagtaccttttcccagtgcacacgtagggaccattttgacttatactttttcacctagcttgctctgttgtcctcccatcacaacctctgctaatcagcaattctgcatctcctaggtgccttccttatagattctttatgtttctgtcccacgaacgataggatctaattttagttgaggatgactgtttaaaaaatgtttcgataaaccataatggtgatggtgggttttgaaaaacgggaaaataaattgggccaaaagctgagtgggaatgaggatagagagggaggtgagctcctagtcagggcaagagtagaggggttggagatcctgaggggagggcagctgaataaggcggtacgggctttgtggatcgcggctctaagggtataccagaaccgcacaacagtactttaaggaaaccagcccaatagtggacctaacaccccaataatgggaactggcgactcgaaacacacggtttcagtatccccaggcgccttaacaataagcagcgggttacagaggaaatcgagtctctccgtggcgcttccaggctgaggacccagcgcctaccggccgagcaccccctagggcagaggggcgagggagacccgcgggaaggggcagcaagccgcctgattgacagcccgaaatctgatcttgtgaaagagacgcggagccaatgggaggcagcgatccatcagtttggattggaggcccctggaggagaagtagaggaaaaaccaccgaattgagctctgtcagaggcgctttcggcttccaagggggaagtgctgggctataattaatgtttttattaaatttggagggaagtttttgcagcctttcgcctagcgtggccttcaggtgggtctttccaacaactttttatgtctctccagataattgcatggttgtgggtcgcaaaaactatcctgatgaaagaggtgtctccgtctctttagtcccgttaggtgcaaagcaagtctcgttgatcgccattgctagttttgcacacgtttgcgaatcagagctgcccggggtacaccgaccgcgcagggaaacatcgagagtgtaaataaatacatcgcctcttgttcggatttttgctactaccgaaaatatgtaaattgtgaactctgttggctctctttggatccaggtgaaggaggcggtgtagggagggttattttgtgaatgggactgtcggagggtaattagctatgcaaattcaagagcttcattcatgatttttttttaagcctaaaagccatcttgttcccctctaggttgatagaagtccagatcctgaggaaatctccagctaaatgctcaaaatataaaaactgagctgagatttgcgaagagcagcagcatggatggattttatgaccagcaagtgccttacatggtcaccaatgtgagtgatcagtttgaaagttgctgtttataaacttgactccgtcgggggtggggagagggagaaaatgagaagggagggggcacgggggttgggattgcagatacttatctgctttgttgccactgtagggcgactctgcttctagaagcccagtcttcaaaatgagcttacctttcagtgatttggataaggcatagttttgtttttaagacccctttttctgattaaagtgcccaacatgagtggaagaggagatggagggcagcagcagctgctgcactcaaagtttttggctgggtttgtctgccacattgaaaagaatgaagttgagacaaatgctgacactttttgtttatatggggtgtttttgtttctttttttttttctcattttctcttttttttttttttcatttctctactctttttgcttttttttttgtgggggtggggtggggaggaggggctgtccaagagagaataaaacccactgttttaatctagcattgaaccagcctaaaaacaactttaagtgtaaatgcttcaggttgttttgatgctgagataccatgaatatatgattgataaatagtaatgtgctaagatcggcactgggaagcaactctccctgcctgcttagcataagctttcactgtcaaataagtgagaaaatgaatattagagttgatactatggacttctatttttctattcagagaagatccattagacttatgtatgcatgtctgtgtgtgtgtgtgtgcgcgcgcgtgtgcgtgtgtgtgatctgaggtttacattcttttaaaggattttatctttccctttgtagagtcagcgtgggagaaattgtaacgagaaaccaacaaatgtcaggaaaagaaaattcattaacagagatctggctcatgattcagaaggtgaggtttgattttgggctgaatccccatttttttacctacactctccaccctgctaaaagaaaaggagcacttcagtcttatcttaaaaataataaactttgaaattactgaatctaactaagactttaacttggaacgatttacataatgtggcagtttgcatgggagactattttatggtcctatcacaaagtaatgaaagaaggaaataaaaacttctcaatgacaaccttcttttaatcattgttttgtgtttaaatacctttgtccatggggcatataactcaccccattcactaagataacaatttaaaaatatccaatacagtgggacaaattcagcagctatgtacactgcttacttttttctttctcctttattacaagttaaacagtattagtgattgtttggtttcccacctcctttacactaaaaccatctactattaacagaattttcaagggtgattttgatgactaaattgtgaggtcataataccttgtttatcgaccataatgtgttcactgaatcatacttaaggcctccttaataattataatactatttgggaaattagtttgcagattctttttatgaactgttgctaggatgtcagtatgttataaattattttagccatatgaggacattcataataaacttcatatgcttagatttaattatcaaagtttagttggcaattttaattagatatactgaattctgaaacttcctcaaatcttcatactatttaaatacctccctccctccctccctaatatgaccatatagtttagaacttgatgagaacctggtgccaaagaattatctttctgacttttataaacctattaatgtagaaattttcctctaaaaagttgtatttgaagtggtttcttttagtttcgaggtattgaagttgaaaacataatactttgacagttgtaccatgtaccattatatattttacgtaagattcagaagatataaataaaatgcttttcagtctttctaatcttccccctactactattttagcaagagttaaatatatttaaggaagatttcagtgaacagacacatattcacctcagcctttttgtgaattctggtatccctgagcttatttattaagctgtttgttaaaaagaagaaaagatgattgactttattctttagttgactaaaataatttcttaaagagttgcttaataggcatgaaaagtaggcagtattattgagatatttaagttatgcctctttttttatttttatgttgactgcgtctcttgaaattaaatttatatttaataccaatttcatgacaaatatttccatttaatgaagactaaagatttgcaaatcttatgtttatgtctttgacttgttttttagaactctttcaagatctaagtcaattacaggaaacatggcttgcagaaggtaaggcaaaatttgctttaaaaggggggaaagcaactctagaaggagaaagaaaagaagtcctgaacttgctgtcttaatattcagcccaattaattgagctctaaaagagccacctcatgtgtcatgcatacattagagcctctgatgagtttgtctttggggactctggggctgtactacccagtgtcatcacaaattaccaggagaaattgcttccagctcacaatcacatctgcttttggcaagaactaatgcaccaagacttcaagttctaagcctctgttcagattttaattgcaattgatcaggtttatattattgtacctccagagacctcctagagccagaacccggctggcttgctgtttcctttagagcagcgcatatcattatttggtgttctggtggaggacttttctgatggcagaaattagtttctctgggttcatcaggacgggatgcttcaagatttaagtgcaagtgtcttctttcctccttgttcacaacacagaacgttaggtgtgtatctaatacttaggaaatctatgggtttaaaataaatgggagatatgaggattttaaaaatgttttccatgtgttactattcatgttatgtttgttgaaattgacctttgctattttgtcagttttattaggatttatttaatagagcaaggatacatttaaaggcattactttcattttgaattattttttgttaaaattttgtggtgcaatctgttatatcttttatcgtatgcaactttataggaaaatgagattgcctcataaagctttatacaacttcaaaaatgcctaatgttgagggacttctgttggcattcatactttgaaatttttcttttggatttggcatacaaatgtgaaacgttaattttatggtgtggtttgtgggaaatacaaagagaaaaattatagatacttaagcattgagtgtataacagtattatttgtgtgttcacattatatgggaaacatgcaaattttggaacagattttaagatggttaaaaaggagagagtgggtctctttaaatggaacccaggtgttactgtagctactttgaggcagactgacgtgttttatcggtggtcttgaatgcagttgatcaagttgctgttagcatgtaaaataagtttctttgttttgctgatagtctagttctccaaagagctttttcaatctttatcaatctttaaagttaaatagctttcctaatagtcctttgaaaggatgattgtatttatatgttaatgaaggtaagacttactgaaagttttggctatatttaaggatcattttgctagtctgtgtaaatgaaacttactgcaatacattactttttattgcaacataagtcatattcagatataagtttttcaaggaaaatttgcatggagattcttgtattaacttatgcctattagttttgcaaagtcaaaggttgtgagaacattacctttatgagagaatttatttgcttctccaaaataacttaaaatatctattttaattgttctggaaggtttgttggttcttagatgtttaaatctcattgattccaagtcagtgcacttgctggcagattttgaatgtgcatagcaactctgttcctggaattttaaaatgtggaatctgtgacagactcttaccattttataatcagtttcagtacttttttttttttttaacttttgacttgttttgtgtcttgtagctcagataagtgattgcaataatttatccaaatttatcttttaaaactctgcagagaatagtctttctccgggattattaacatacctgtaaatcaaacctgaagatttagcactacaaaaaataaacctagaaaatgatcaatgtatttggaagaacatggacctttacttagaaaagaattataatttcaattaagttcaggaattaatcatgagtgttttatatgaattcccaggtggactactatttacaaactatggataagatttcattttagaataatttaagcattttcaaaacagtttacgttaatttatctaatcacgatgtaagtaaaaagttgttaatgtgatgtttaaaacctaatagtgagaaaagagatctttttaacttcttgtttctagactccactttttttttgttttgagaaattaaatatattattttgcactgatattttaacttgacttatcccacctcttgaacggtattagctaagaagagatccccaaattaccctagtttatttgtagtgagatgtgtccatttatgtctttctggacatccagaaattaaaacattgccaaattggcagaccatgaaccgtttacatatttcttttcataatgctccatagccaagaaagtgaccatggaattttaagacatcttgacccttttaaaaaagatcattggcagttaatcaagtttctcccatgagttagaattccactgggaagttaaacaggtctaaaaaccttattagacataagagtcaagttagttgtcatatgtcatatgataattgtgtttttgaaaaattataaaagtcctcaaatatttgtgaaatgatatcttagcatgtttagtttgtttttttctgtaagactattcataaattttaccccaaatgcaacatatggattagtcatgggtaattattatggattataaaatttcttttatttctaaggggaagttggaatagataaggcaggactgtttgagggttgggatgggaccagtattttcagttcagtaaagtcctctgtaaaaatatacttgcattctaccaagaaagttaattcccatacagagatttaaatatgttggtggagaatataactttacattaatatcatttcccaagaaataacactgcaatttaaaggttttttttttaacatctaaacacagtttaaaacaattatcttattctgaagaaaactgcaaagttaatgttttcagtaaccacagtagttaaaaaaaaaaaaagtcagggaatatgccaattttaaaatgttgccatagtcactttatgttataattttactatgtgcaattctttattgattctttgtcttttaaattagactgctactgacagaaaggcaattgcaattatttgatcccatgaaataatgagtttaaatatcaattctatcaacatcatggtgatgtcttattcttaacaacctgaaagtcatagttaaaatggaacctcttgtgtatccagaacaaaaatagaaagatgtaaaaaattaagacaggattgtattcttccaaatttgcttcttaaagctcacctactaacacaacttaaagggaaataataattttcagtatatatctgatgtaaatgtgtagctgctctcttgactgttattttgtttccggtctagatgttctttcaggttcactttcatcaacaatattctctgtcttcagggtaaaatgttttccagtggttttgtattgagtcaagtttagtgctgcctccacacttcgagtaggagttttatctgcaagaacaacctttctacagcaaagcttattacatcatacgaataagggttttttccttttggttttatgtgaccttcaaacaacagtcaggtcaacttaaaagcagagatgtcattactttcccctcaattcgctttaatggctgatggtaaatttatattcaaaatcataagtaatatgtgctattgttactcactatgtgtaatgtcatccacaatatacagtagtcataatacactcatttttatttttcagaaatcctactttttttcaatggaacataaaattggttatgtgctcatgaattattttcccccacttggtgcaataaggattaaaggctttaaaaatgacattattttatgtggtttacataaaacatgaatttagaattaagcattgaattacagaactccatataatctcttataattgaacaacaataatttcatgtgtgtgtgggcggggagaggatgggctatcacccctctttttgatgtgctagaaaataatctaaaatatgagagaaagacttcccatttgagtttgacttaaagacagcagataaagtatattttatttctaaacattcattggaattgcataaatgttttttcatccatgttttatttacaaaatagaaattttttttaaaaatagaaaaataggatttggtgtagtatagtgtagtttttccagaggatcctaataaataaaatattgctaagcttttctatttcagttataggaaatgtgcagtttgttacattttgtagtataactttattccctttgatttgtgtataatgttataataaaaaataataatagagtcagacctctgtagcattagagaaaatatttggctagaaacaacggctagttggctctgagcttcccttaagttttcaagttactgcaggtcagttttagttaggaattgaagctgatttgacacaacgactaaaactttactgttacagtaagaatatagaaatatggaaataatgccttgatcaagtattaaagatgttttgtcattggaaagttgcctcctttttgtatgtttaaatatgtttatacttctgcataattaatgcttttacatttgtacaatcattttaatgttaaaagtggatgtggtataaaaccaagcttagtggactcatgattattttgttccatggcctgtagcttcaatttaggattaaacagcataccactgtaggaaggtggatttttctttttttacttcttatttgaaataaaatttaaatttctcatgagaaatttgtttctaactctttgattcaaagagaaatgctacaaagttcagcaaacaatctacagtattcttatgataaaaatagttggataataggcaagaaaaataaggcatttccgtaatggtttttcttttccctttcttgaaaccttctttgcatctttctgtcttttccttttttcttccttagttttatacatgcaagtttctgtaacaagttactctgtaaagcaggatgcatgtatgtatttgtgtgtgtgtgtatatatatatatatgtatgtatgtatgtatgtatgtatgtatgtaactttctaaacgtcatttatttaaatgtgtttctttaatggatctgagctctgagacagagcaataaaattggtgtgtttatattgcaagtccaagtttacttgctttagctccctggaagggtgtgacatgaaaagattgtggttgggccacatggctcatatgctggactgtgtttttgtgaatggaggcagaactccagttctgcctgcttgtcttgaggaattgctgaggagatcagctgtctcattcacgggcagaaagaatgactcatacatcttccgccttgtttggctccaggtcattgttacagtggatagaactggttttaattaaatattaaccccttttatacttgacgtttgttttatttgtaattcttccactttttccttagctttaaaaaaaaacccaacaggcacatagtttgtaagaataggggggttttcgcttccctgcagccaaccttggaaactttttcatcgcttactttttcttaagtaatgattattatttcatttgaaagttaaaaataagcataacataaaggcaagctatatttaaaattacccatctctaaggcaatattagttaagaaaagtattaaaattaaaaaggagaattggtgagtttgtgacatataggtcatgattaatatttttatgaatttctttctgataatatgcattgatacgtagcaaaaagacagaaaacagtaaaacaactttggataataatctaggtaaaacaaatagctgagagtgcagatactgcccttttaaagccgacatcctgagacttgatggcaactggtctattaacgtgcaatgaactgatagagccgctccagctattaccaataaaatccacatgcttaatctccttgaaagcattttattggtcttttggtatatactttctccccttctcctttcctcctcttccccttcgtctttaattacatagtgtggggaaacattttcattccccaaaggtgattatatccagcacagtttataatagatagtagtggaaaaaacattgcttttttaggctgacctctattgttaattttcaactttggagttggtatggcttgctgcaagttttcaggcagctgcagtttgctccttcacagtattcccctgaattgaagaaaaaaggaaatgtatgatacaagtgtggcaatactttgtcatattttccttgcctagatccaacttgtgtttttagttaactgctttccgtttactctaacttgaaattagaggtatacttaagcctttgtctatttaagtagcatgctgcttcgtttggtctattcagtttcttaagattagcttctgtgaaaatgtgagtcatatgttttttgttaaaattctgtaatatgttcaggaataagtgtgaagtatttattcagtatgttaaggagttagaacagaaataggaattcttattcttactctttacagattgttatcgtgcagctattttctgtatatttgcgaggtataacttctagattattctactcctaaaatttggcccttttttcctcacacatattccagcacacatcacacaccaatcagtgagtctgtgctgctcttgcagtgacatatattaggaagttgcaaatctgcttacgatgctacaaaaacaaacaaaagacctttaggacattcataccatcatattcagttacaagtatacttttgttactcaccagctatttttaacttttcctgtaaagggatattatatttttattagattcttataaatgttggctttttaaaagcccagtaattgttgtggttgatatatttgcatctcaatagttatatctgtttagctgttaattctgagggaaaaccaaaacaacgatataatgggaaaaatgtgcaggatttgaatctgtgtacttgctgttatttattaaatatatatttaaaacacttgtaatttttttgatatgaagacttacttgaaagcacacccttcgccttgtaatttatgaatcttttagaacatttttttctgcagtgtcaaaaaaatatgttgtgttaatagctgagagaatgctaatgtacagattttagctgtttcgttgcctctctagtagacttcattagaagtaaagatattaaactgagcgttgtaatgacatgtacttttttgtggatgacttgaaagacaagggttggtgggtagaggactggaaagaagaaaataaggaacatttcttgagtagctggcattgcgtttagactgtttcatttaatcctcaccaaaaaactgtattttcactagtaaactgataagtaaaattcagttctaagaggttcagaaacttaaccaaagttgcacaactagcatgtcacagaattaagatttgcagtttgctaactttgaagttgttacccacagtatcagatattggagcaatatgaagagaaaaaaattctccttgcaatataggctgatcaaataggtatcagttaaaacttgaaaaaattattaatttgtttgattttgtttggtagcgggggtagagtgcattggtaataaggttaattattggtgtacagaagagagttgttagaaaacagttgaatgtcaaactgcatacatttttataacaggcacaattatcagattcttatgctcttcataatataacgtaaattttattcagccaaatgtctgtttttaaagaataatattaaactaataaaaagaaactttaattctgtatattgtattattttttatataaaatttttttaaaatgtagaattcctttttatgtagatttttttcttaagccattcagttaccaacctgaagcattttcaaaagagactgtttattttaataagcattcctcatgcagaataggctcatttaagaaagttaattaacatctatttaaatatgacttggctggataaaaaagtttcagtattatgtaacactaataaagtaatactacctagtcaaatgacagctaaagttaattaggatgataattcattatatttttatcaaattaaaagtaacctaacttctattttttgggcgtgtgtgtgtgtgtgtgttttgcatgtatttatgtgtgtttgtgaaagcttattactaatattcagtttggaataggttacttcgatgtctaaatcaactgtgatgaaaacattttagaagtgaaaaatgcacttgtgttttgattgctgccaaatgcattaagtccttgctattcagtatttttccttgactaaaaataggaacgtcttttgacatgaggactgacgaactagtgatattctttttgttaatgcctagtagttgccaggaaaatattttgaatgaaaagatgacatttgtgttattgtttgttattttgttaatgtgaatataatctttgaaatataatactttattatatatgagccaaatcaaggaccattcttccatttaaaaacctttgtagcatactttggcaaaattcagtgcaagcatcttaaaatatggtgtattttgcaggacagagaacataccagcagacgtttctaaaaaagcagagagacgtgtgtgataactgcacatcacttaaaataattgtgtggttaatttaagtgggctgcttacacactggcagtgggtgaattgaaatagcttttgctctattcttgaaaaaaaactgcaggaaatggaaattctatagctttctttattttgcatctcttttatttccatctggcaggtgaaattcggagggaatacacctgccatcatcctatttctgacatatatatggttcctaggtgacatcaatgatccccttccatttctcctcctaagtagtgttgtcaataccattttaaataggagctcattggcaaataatcataggtttgatctcagcccaagaagatcttacttgacagattttacttgacattccttatgcttttggcagtttctctcttaatttttttttaattttctttttcttcttcagctcaggtacctgacaatgatgagcagtttgtaccagactatcaggctgaaagttgtaagtatagtatgactcatctcttgtatttttctgtctttctcatttccttctttcttctttctctttggttggttttcacgtccagtgtcttgtcttacattgtaccagcgcctttttaacttacagccataagatgatttgatttgttaggttgtgacatcagcagaaactctgttttgagcagaatgcttgaattctgtatatcggaagagaactccaaatagtaggcaaggaagactgagttgattgaaagatggtcttgttcttcatattggtaaatatctttgggaggaaatagcatgtgatccatgaacatgcacatgtttacttccagtttgccaatatgcttacagagaaatgcctggatgctgatgggaggtagagttaaaaactacttgagattagttattgtataatttataaaagattctggaccaaacattcattggcttattgtagtattgtacattcatgaattgtcacctgcttttatttaatttttagcctgaaattttctgcttcctggttgcagtagcacaaatggaagcagccattggcttctctcagggttcttccttctgcgttcctttccctaagccttgctcctgggtctgtcagagaatgcgcaaggagtgatgcatggagtactcactgtcccttaattgcagagtgagcgttttgcctgtacaaacgtggttgccttggggtttactgctgatatttataatctgccattctaccagctaactgctgctactgaccaaaggagcaaatactaaggaaaagggtataaatgccatcttaattatgaaactggcctaatgcatttttgttctgttggtgacatctaaatttgttttattttttctaatacagatacctgcattacttcaagtaacagatgttgtgggcagtgttttcagcatttatgtttgatatgttaaatttctcaggcgtagagggttgtgcaaggttttgtccagattctctaacatgttacatgtttcaactcagcttggttataaagaaattactgtggtaaaatatacataccacaaaatttaccatttcaactatttttaagtttgtagttcaatggcactaagtacattcacattgttgtacaaccttcaccactattcaacttcagaacttttttgtatcccaagctgaagttctgtacctgtaaaacaataactcccatttctctgccctcagtccctggtaaccactgttgtattagctttatttttgatccgagaagaaaactgtataatgctgtttgatgtctaaatacaggtaattgacataggctttcaagaaacttactcagcaactatatagaccttaattagacacccttagaaacactcccagaaggatgatggctaatacaagtcctccccttcttgattaaagtatgggaagagaatgtcatattgccaacatttcccttcctatgggcaattgaattcttctttctaaaagctaaacacgtcgtctgagtaaaagaattaatctcgttgatattttacatccaaagtaattggtaacaattccaatactataccaattgtcagggtaaaatgaaccacctataggtaattttttactccttttcttatttgacctcttttcagcttttcttattgaatatttagtctctttgaactcttttctgaaggtcacactggcgtgattttcttcctttatttttttttgttttttactcccttgaccactccttcttactcaactcatcttccttccctcctctttgtggacctcttctttccctagggttctgtcccgaaacctttcctttttttttttcttttcttttctttttttttttttttttgagacagagtctcaccctgttgcccaggctctagtgcagtggtgcaatcttggctcactgcaagctccacctcccgggttcacaccattctcctgcctcagccattctcctgcctcagcctcccgagtagctgggactacaggcatccgccatcactcccagctaattttttgtctttttagtagagttggggtttcactgtgttggccaggatggtctcgatctcctgacctcgtgatccgcccgccttggcctcccaaagtgctgggatcacaggtgtgagcccctttcctcttattttacatgcaccatgccagcactgtcccatagaactttctgtgatggaaatgactacacctgtgccacctgatacagtgtccactaaccacattggccattgagcacacgaaatgtggttagtgggactgaggaaatgaatttttaactttatttaattttgattattttaaatttagacatgtctggatactggctactggctactgtattggtcagcacagctttgaacagcgatgtcttccacattgttgtctccagcctggttcttccctccgaagctgtccattggacatcctcacctgatccctgctagtgtccctgtgcagattagaaaaaggcaacacctctggacttgctcccttagcccttggctgtgcattgcacaaaacaccatctacacgccaactccaatctttaacgcaacactccacagacaatttacactcagcaagtccaacagtgaaatcatgatttttcctgaccaacgttgctcttttacttctgttgcctttctaagttactggcatcaccatccaaactgaaatcctgatatttatccttagagacctcggttctttacaataaacctcaaattgctaaccaagttgttgatcctagctttcaaaaatatcttaatttcatggcctctccttcatccctatttcattgttttagttcacacacctacattctgccttgactgaacttctgagtcagccttttggttggttttcttgtcttttgattttccctctttgcaagccaccctgtgcaatagcattaacacacagctatttggccttgttacttttcttcttaaactgtctgcaggacagagtcctatttctttagctgtacggaaaattcttctacaaccgaagccttgactgtcctttcggtttaaactcttgctactccagtgccctgacttttcctttcctctgtactttagcccttctaatttttcagttatctgggcagattgagctgttttaaatctctttgcccttgcatgtgttcattttgctttaaaacttttcatttttgttttgcaatctggtgaacctcctatttcagactcagcttagatttcacctcactgaagtctttctcagccttttcttgccaccctgaccccacagagttagctggactccacagcatcttgtatattatatttattgtattatagtattttagatacatttgtgtctttgacaagattgtgaacttcttgagggtacaagaaacacgtcacattcagcatggcttacatgttatagaagaacaataagtaaaattatcattgcattcatgatcaccttcttagtgcttatttcctcctaagcatcttcagagtcttaattcgtttcttaaggtagaaacatgatatgccttaaaactgcacgtatagtctcattctgggaaaacttgctgaaactatgaaagtttaaccaaatattttcagaattgtgaaggtttattttactttaattagagaatatttacagtttaacaaatatggctttgggacatgtaaataagacacacaataatttaaaaaaacccataaacagaggcaaaaataagtctgaaatcgcctaatttaaaaaaaaaagtggaaggatatgttatttcaggttttcacagacatgaaggactattgttcagatcataataaccagctaattttattcttcaccgaagaaaggacaagagggaaatgatttaaaaagaagaatagggcatttgtattagatactaaagaggatttctggatgcagaagtttatcaaatattggaattgagaggttagatggtctccaaaatgcctttaagcagatgtttgattctcgtgcgtctgggtatgcttagtgggggcagagggatctatctctagaaagagaaagaaactgcatcccctctgtgtggcctgtctgtaaattctatggggatatttttaaaaatgtgagtaatcaggtttccttgcatacctcaatgaaatcagatgcttctgccttagcttttactgctttagtcctttggtaaatgaaggttaagagagtgaagagcaaaattttgctcaatactggattatagaacatgcatttgactgtaacatgtttaaatgcatgtagaataatagagatcagagcatccaaaaattgtgaaaatgagattaaatcacaacacttgagaactttctaaaaatttccctgagcattgtttgttgctgtttacaaaatattttaattggaaatgtggaatccagtgatggtatattatagattgctaacctttgaaggatgctaactttgaagcaagtataggcattaaaaataagtgaaaacagagcctgggcatggtggctcatgcctataatcctggcactttggaaggctgaagtggagaattgcttgagctcgggagttggagaccagcctgggcaacataatgagaccctgtatctatcagaaaataaaaataaaaaccaagtgaaaacaagttcctacaagtgcatgccaggaaatcgatgaaggctaagagaaacaataacatgcttttaacaaattgtttattccttagcaataaatcttttcatatctcagacactctgttggaaaaaatagaattacgttaggatgtgcttaatccagaagaaatagaagtgtatcttctcaaaaaggacaaattaaggagtatttcaaacataggtgaaccttatgtttctgaagtggatatacatttgtatttaaacagaattttcctaaattgtttactttaagtttaattacatcaataatgttatattttcaatcttattttattctgagacagggtctcacttggttgccctggctagagtgcagtggcatgattttggctcactgcaaactctgcctccttagttcagcagtctaccctacttcagcctcccaagtagctgggactacaggcacgcaccaccatgcccggccaatttttgtattttatagagagatggggttttgcccaggctggtcttgaactcctgggcttaagtgatctgctcaagtcggcctcctgaagtgctaggattgcaggcatgagccatcatacccagccttaaatcatatattttaaatttagttatatcattttttttttctttttgagacagagtctcgctgtatcatctaggctggagtgcagtggcacgatctcggctcactgcaaatcctgcctcccggattcaagtgtctcttgcctcagcctcctaggtagctgggattacaggcatgcgctaccatgcctggataatttttgtatttttagtggagacggagtttcactattgttgtccaggctagtctcaaactcctgacttcaagtgatccgcccgccttagcttcccaaagtgctgggattacaggtgtgagccactgtgcctggccgttatatcattcatctttgaaaatctaccacctttcattttgttcttcgtaacaaagttatgtgttatttttagaactagtttgtttccatttggttacattagttcatttcagtcttttctctgtagtgattcacatgatagtgactttcacatttacattttatcttcttccagagcatttccaggagtgtgcataagtcccagggttatgcaaaattcccaacagaatagatccttgtaactctactgctttgtcttacactcagtaaaacacactggaatgcaagtccattggaaaaaatgttattaaagaaataacaataaccctgactcttcactatttacaaaagtaaatcttttgcaaacttctgtactttatcagatatctgtaatacaatactagaggaccatacaaaaatcatccagacagacccttgtgtggggactcaactgtttaaaaccactaatattattacatggatggcactttaagtaaatgaaaatcataactacactttgtttctttaagaatttctggttttaagaatagcatttgggtcgggcacattggctcacgcctgtagtcccagcactttgggaggccgaggcaggcggatcacctaaggtcaggagttcgagactagcctggctaacatggcgaaaccccgtctctactaaaactacaaaattatctgggtgtggtgtcacatgcctgtaatcccagctactcaggaggctgaggcaggagaattgcttgaacctgggaggtagaggttgccgtgagccaagatcgtgccatcgcactccagcctgggtgacagagtaagattctgtctcaaaaaataaataaataaaataaaataaataaaagaaagaatagcatttgacttttttttttcaatgaagtggaaaaaagaaatacttagattactgttacaaatctgcttttaaaaaaactgaagtcagtcaggtctgtgtagaccctgactgaataatttgtgttaacacgtacctgtccaggatcagaaaaattccatttgtggtttgttttcataatttcctgcctttttactaagttaccttcctacatcttgtttctttcaacacatacagtgagtactttataaagttgattttttattactaattttgaaaactttcttgcccgattaagtttttttgatatgattggtcaggaaaacttcatcttctttcgtttttctgactgcttttaccaaaatgagagcacacactgaaagagaaatggcatttttttggatttaagaacatgagttttttggtttgttttcaatttcaaaaagatttaaaactttttttgaggcatatttaaacatgttaccaaatagactcaaactatccatttcaagcatgactagttgcataccttctcgcccaagttagtattcctgagagttatacgatagctacctcttgatggttctgagtttcttttgggtatgctttttgtagttgctgctttgtgtgtgtgtgtgtgtgtgtgtgtgtgtgtgtgtgtgtgtgttttgagatggggtctcgctttgtcgcccaggctggagtgcagtggcgtgacctcagctcactgcaagctccgcctcccgggttcacgccattctcctgcctcggcctcccggctagctgggaccacaggcgcccgccaccacgccaggctaatttttttttttgtatttttagtagagacggggtttcactgtgttagccagtatggtctccatctcctgtcctcgtgattctcctgcctcggcctcccaaagtgctgggattacaggcgtgagccactgcgcctggcccagtttaaatattttgtcaaagcagtttatgtacagagtaggaaaaagtgcaaataaaattattccccgttcctgcaacccacaactcacagtcctctctagaagcaactgccttttagttgtcctacatactaaataatatgcttgtactgcaacttcttgttttattagttttagattttacctgttgtcctatgaagatagaaaaacattttggataggttttaattactttaatgccggtaatcagctgtctgattctacttcagtccgtattcagacctgggcatgaataaaaatcatttgggaagcttgtgcaaatgcagcttcctgtttcctatcctgtgagagcttgacattacaggcctagaactaggcttctgtatctctaaggaactgttaggtgattctgatgcaggcctttcgtggagtgcaaggttagatattttctcatatacttaattgtaaaataaagacagcagtatcagtcttttgcaattaagttgtaagatgaaccttgccattcatacccatataaaatttgttatgtgatagaggcaatcagtttctggaaaatattatttaagtaatatattgtcatcttatttttaaaatatactagggaatcaaaaagcgaaggctatataaaaatgatattttaaatatattcttattttatcatctttgctagaattatatatattttcctcttccaaagattattctctattttagctgtgagaaagtcattgctgattgtagatttctgttatactggaaccaattctagtttagaaggaacttcccaatgctgattagagagagccaaggcattgatgacccaccctgttctaggtgtgtctagtaggaattcttgtcattagatgttctactgttccactggtgcagatgtgttccatgtctgtcacaaagcccagcagccccctttccagtaaagcgaaaattttagtttagtacttgattgttttacaaggaatacattttttaaatcaaaatgaagatccaatgaaaagtactctccatcttgcaagtaggctctcttgcaagaatttttattttagataccctcccaggaatccatcaagtccagtaaaagaaataaaatctaaatcatagaccttgggtatgtctcttaacctttacttacttatctgtaagttgacagggaaacaaatcttttaggcccagagccacattatgattttgtgccagaaggaaaagagaaaggatactagctaaatctggtgaatgcatgcttgacttgaaaagtgggttttagaaaaaaacgtaattcatgggggaataatgtaagtagaatttgctatgaaggacactttcccttataggaagtaggtgtactttcttttattggtatacttataattttctcactgtaagtatacggaatataagtattggacaggtgcagccaatacttatattctgtatacttacagtgagaaaattacattagtcttgattttagtaaagtatgctctagtagatacttttcactatttttggttttaccagtttattcttgttaaggtacatagggcaggcttaccgcccagatgaaaaccaaaaactaaaattcaaaactctacaaaactggtgcttgctcttccaaagatgaaagctaaaaatatatatattaacccaagtctttagctttttctttcctatttttcttctttaattttgtccttaatataacaatatattgtagaaattgacttttgaaatgtgctcaaaggaagttatgtcagcaaatattttttacttaccctccctataattagtcacaagttattttgaagaaagtgatctataccttctttggttgaacttgacctcatattaaataattattttgttatacaatgaatggacttgatagaaatataagccaagcaatatttattggaaaaatctaggtaaaggatgtcagtggaaaatatttgcagaaccaaatattatactttttgtccccatatttttaataaatacacatacatctatatattctgatatgtaaaaaagtaaacacaacaattattagtatttgaaactaaaataaagcagtcatgaaaataaatatatttgggggctaccacctcatagaatatgtaagtttcatgaaataagatataaagaagaaataacctgagctaaactagtacatgtggaccttcacatcgtaattgtatgcttagtgtttgttatgggtttttattggtatcatttttccactttttttaaatcataataaacatctatttaagatgcacaatgcatatttgcttctgtctgttactgaattttttcctaatgagagttggtgctgtatcttactaggtaaaaattttggttagatgctattgtttttttaaatctaaagcactatttgcatttgacagtagctaagggtaatgttaactcaagaactccattattggcaatatatcaggaatggctagattaaaaatactgtttaaacaatgtctgattaagctttaagatcagaaaagtacctttgtgcaatggttttgtatgtaatcttttgaatcttttgtaaatctagagtttagcaaagaagtttttttggtttgttttgctgtgggtatgacattattaaactattcagagatttgtttcatagttactcctagttattgcctatatagtcctgttttgactagtttttaggtcctgttgaagaggcttgagttgtgatggaccctttaattatcttttattgtagcagaatcttgtattcacatttctgtttgcaaaattggaatgattatattttgcaaatgagatccgtatccattactgttattttttatgatttttaaatatgaataataaatcttaatgtataacagttcttattttacctatgagagtttagtttaattaatttatttattgggtacatatgctacacagttgtagtctgtacaggtgttacgtaggtttataagactctagatgtttattcattcaacaaatgtgttttgagtccctattatatgacaggctttgtcctagtcactggagatacagtggtgaaaaaagtcagaaaaatatctgctatcatggagcttatgttcttactgcatataattgataaatgaagttgtatttatcacatattgagtaatgtgaaattatatgagtgatgtgaaatctatgcataatcactgtgtattcagactctgatctattacatattgaagaaaatgtgcttaggtttcatgtaattttaggtttttttgtttgtttgtttgtttttgtttttgagacagggtctcactctgtcgcccagtctggagtgcagtggaatgatctcagctcactgcagcctcagtctcctgggctcaagtgacctcaatctcctgggctcagatgactctcccatctcagcctgagaccataggcatgcaccaccatccccagctaatttttgtatttttttgtagagatggggttttgccatgttgcccatgctggtcttgaactcctgagaccaagcaatcctcccgccttggccccctactgtgctgggattacaggtgtgagccaccacacccggacttaattttatacttattttaacaaaatgtactctgtccaaaggcaaggccactggattccctagtggatgatggctatcagtgtctgtcttaacaccttgttgacctatgctaaaattcatgttataggggactgacaagaatatctttggacttttaaaaaatgaggtactctactgttaagtattactatttacagagtattgtcctattcattgagatcatatttgttctttaagattcagatcagatgttatttttcccttgattatcttagtcagaattaacaaattttatgtgccaatacatactttacatagatcctaattttaatcctattttcattggcttgtagaggatggttcatgcccggtttatgtgtatgattcacatgtttgaggtattcattgaatactgaattgaatgaatagtttcttgggtatttagaatcttattttttaaaaaacgtattcatgcacaggtggcttgaattgtttgaaaacgagtgccaatatctgcttttatttccctctgttttatttttctttgagggctaatggaaagctgtttgcatttatgtaacattagagctaaatctcagttatcagattagggcactctaataaatattattagatactcctatctcaccacacatttctcaataatctctattaggacaaatactctgaaataacttgatattattcctgttttacatgaagagaaacccagggcataaaataatcaaatagctaaggcatgtgatgactgaaattacacagctgagaatcccatctcatggttgcttagtctatgcagatcttccctccctgatagccaatactcagactacacgtacaagcttcaaaactgtttctattctgaaaaaaaaaaatctgcgtggctaacaaagaatgtgtttcactaatagtttttgaaaattattctcatcaaggtatgatagatgaagagagaccaagagcaccttccaatagaggtttgtctcaagaaagatgttctgtgaactcatctgagcgaatagctgtgagaaaaatagatgggaggacatggtgttcgggaactattccagtccttgtctaggctgcagtgtgtgcgcttctctgcctcaaatattttctcttatttaccagaattcaagagatgtttatgataacactgtgtatttatgcgttgtttatgcacaggttttggccccagaatgtttcagacatggtgtatttttctcactggaggagaacagccatttgggaatggaggcagtagtagtagtagcagcagcggcggaggtattagtagtagtagtaggagtattactaatgttcatggaattcccattatagtagtaaatattcatagaaatttcaaagctgcagcttgagacgataaagattaatgatatcaacacctttaatttaaagatgaaaaactgaaacccaaaaagattatcaggctcttcatgattttaaaagaaagattgtacacccttagctgtgtgttgggaaaatagcaaataagaaaaagtatgaacctggatgctttcactcattagtgatttttttctttatcagattcactataagatacttattccagtatcttattccagatactggaataagaaatacttttctcacccattttgttattcagaagggtatttttaaattctgctacatcactagcacaaatgtatatttgttggatgaaggaatgacttcaattcaatatttttatgccaggttttgtctcgtttatcaatgttaatgtatctatgcataattcttagcttagtattatgtcgatttttcacattaagtatgatcgtgatctataaaccaataccaagttctggataaattttgattagaaatatgtgcccccctttttccatttatcccccagaacttttcaacactgaatttagtcctaaaccataagatgtttttcttagaattatttccagctgcagagttaccagcaaaagttgttgtcaaatactatcaaggccaccgaacatggttaaaaatggctcatccctataaagatgtatgggtagtattgaagcaaacctctcagtagtgttagcttttcctctgaaatggtggtcctgctgtgaagtgaacttttactgctgtttggggttgtttttctccatcctcatgaacacaacagccttattatgttgatttgatttgattccctagtccttggcactggggccagaatgtcaggtgatgcagttgtctcaactcacgggtctgtagggaaagccaaatagctggatgtcattgctgtgtttctctggatgtttttgccatctgaaatctccatgttcctgtattctttcaggaaaatcaatccctgttttcctttgtgaaagctctattttcattcatagttttattgcagattaaaggctgttgcattagaaagttatcagctaatcaataaacgtcagtcatcccattttgtgataaagctgtcccattgatcaaagtggaaatgtgggcttttggcttttacatagcaatttctgaagttcggataatgtgcttatggaatatatagacctatcctcttatttataggtcttatgtagagatggacatatgaatttatgtgtacgtaatgtacatataagcaggctaatatatacaaacatctgaattttatgtaaaatataacattcttttcttagaattttggttaaattctaagaaaatgagaagtcatcagtaaacttctctctctatatatacgtataggtgtgtgtgtgcatgaagtttttttttttttgccaagattggtattaaaatgttttcaaaaaccttaatgcaaaatttcaatggttgtgaatatagtaaaacacacatgaattttgtgattacaaaattggaaaaatatgctcttattttcatattatttataatagttaagggaatagcagttttagactctttaggtttggcatctttattttggtaacatgcagcttgtcctgttggttaaattcttaccgtggctttttttcataacgaaaaataagttatgttcacaaatattcatagtgccaggcattgtgctaggtgctgtgaactgaaagatgaatacaatactagcaataatactaatcatttatatttgttcagcattttagatttcataggccattttcacatcctgtatctcatttgattctcacagttaccttgggatatagacagagtagacaaagctcatacagttttagtgtggttcctatataaggaactacattcataggtgttgaatggcagaaccaaaactcaccttgtaacattttcccttgtatgcattccagtaaaatgtacaaagttgttattcattgatttgccatgactatacaagtgaattaaagacgtaaaataagtgtttttgccacatccgtgtatacatatatatattcgtatgcttgtgtaatacaataaaagaaaaatggaaaatttatcaaaaatgatttttattcttcatggaattattctaatttataacataatgcacaaactaatacgtatatggaaagcaagggtggagtgggcaatccctgaagttccctgtttgtctatgaaaatctttatgcttgtgctttggattgtagaaatgtggttaagttctatgtatacataggtcttcagcttcaggaatcctgaatgtttgcttaacaaaataatgatgctctcaaaagagaattttaaaattggtttggactctatttggcaacacataattaggccaggaacatttgctaatgtgctgaaattaattgaatatcacattttgcgtcttgtctgatactacttttttatattatttcatgctgctgatagtgttgatgttgaagacactaaagccatatgatataaacgtgatgagatttatctatgggactgagtacattgtactgtataagagtaggacattggacctaggcctcttgagttcaagtctctactatttactagctgtgtgaccttgtacaagcaatttaagatcattgtgcctcagtttcctcttgcataaaaatgggataaatattatctcccctagggtgactaaatgagtatttatatatatacacacacacacgtgtgtgtgtgtgtgtgtgtgtacataacattgtatatgtttatgtgaaatatctaagtaatatatttggcacatggaacatactatataagcttttattctgtatatacaaaaatatatagatatatgaaatacacaaaacataacattcataatatatcacacgtgcattcatttctgatcaacttaactttttgtgtttttcttcatactcataaataatgtctacacctaccaacatgtgggctttatctactgtatctacacatactgtaaatagttgtaacaacttgaccttttgctgttgatcacactaagtagttcagtgtatatctgtaatgatactgttagaagaaactaagaagtgttgtttgttcaaatctactttgaccataggaattcaaaaacaaaaagtgttgcactggaaacattctgatacttgtaatacagaccctactataggatcagttagcatcttatgtgtaagattatgggttatgaattctggccaatcaaggacaccctaatttgtgggtctaacaaaattgcttctatcctcaatgtttttttttatttcaaagttgatgtattcattgaaagggaaaaaaagtgttgatttttcaattaagatgcaacctttacaatgtaaagcaataataattatagtgttcgctcagcctgaagaaaaaatttcactacttaaatagcaataatcaagatgagaactacattagaagggtgctaattttatgatcattgctatttaaataataaaaatgaatccacaggacccttgctgtaacactatttgcaatgaagtggtattcagctttaaaatggtcctcttgaagcccatttaaaattaatgggctgcttaaattgtgaatgaccaaagatcaccttataaaatagctacttttccaatcaatcaattattaggctatggctgggcttctacaggaccagatgtatttgacccaaagtatttcacaaatattagtgcaatcattcttatataataacagatttttctttttcttttttttcttttttttttgagatgaggtcttgctctgttttccaggctggagtgcagtggggcaatcatggctcactgcagcctcaaccacccgcgctcaagcgatctcccaactcagcctcttgagtagctgggactccggtgtgcgctaccatgcccagctatttttaaattgttattattatttgtagaaaggaggtattgctgtgttacctagcggtcttgaacttgtggacccaagtgatccttcctcacaaagtgttggcattgtaggcattagccaccactcccagcatatgataacagattcttatattttcagcccccaaggaaaatcaataacaacaacaaaacaaatcagaatttgagtttcatcaattggattctgcatgctaaatataagaaaaataggttctagtttttctctctccaaaaagaattactagcatcagagaatttggcactgaggtaaaatcttaaagtagctataagctcacatggcaacatgtgagctttggagtaggtttaaatctaagttttatagatttacaaattttataaatttataaattttatagatttatagattggagtaggtttaaatctgggtttaaatctaagttttataatttgctatttttgtgattttgaactaattaacttctttaagctgtgtaagtaaaaggggaaaataaatgggtgaatgtaatgattaaatgaggtatcttgtctgaagaatttggcacatagatgagtattgaataactcagtagctctgtagaagtcaggcagtatcaatatctacttaatttatgtactgtttttagggcagaggactttataagctatagtaacagtaatgaagattcagaatagcaatgttgataatataattaaaggaatttaagatgattgcatttgattaatttagccatgaaagagttggtttgtgatgtcattactgctgccacatactggtagcatatcttccctagacagatgtaattattcattatagattgttctctaagaggtgaacaccgtcttcctttccattgtcctccactagcaactcaaaaagaagaaatactttagatgtagcagcaaatacattacagatctgtgaaagagcctgctctttattttatgtggtaggttgtctatgcacagtactccaagtatttaacttaagaaagataaataatctatgtatggctcccaatttaaaaaaaaaaaggttccagagaatagatctttttttttttttttttttttttttttgagacagaatctcactctgttgcccaggctggagggcagtggtgttatcttggctcactgtaacctctgcctcccaggttccagccattctcctgcctcagcctcccgagtaggtgggattagaggcatgtgccaccactctggctactttttgtatttttagtagagacagggtttcacgatgcaggccaggctggtctcgaactcctgacctcaaatgatccacctgcctcggccttgcaaagtgctgggattacaggtgtgagccactgtgcccggccagaacaaaccatttttaagcaatcattttgagactcattccattttagacattatatgaattacttgcagagttataatgccaggataaagatagataggtacttaagtatctatttatatgggatataattcttatgcatgaaaatatttaaaaaacatgattcctgccttctaaaagcatactgtgaagtatggaagaaggggaagcatatgctgggactagttaaggtacagtagagtgggaagttaaaatagcacctaagagtgcaggctttggagtcctactagttaggctcagtgccccatctactacttcctattgataaccaggtaaccgtggtatgtcaattaatctcttagtacttccatttccttatctttcaaaggggctttgaagagtgaggatactatagatgtgtaaggaggataaaatagagcattcataattattaatattattactattattgtattaacgattaaaaaaatactacctgactacaaattaaatgagtggtccttacagatactaaattctatagtttttttttttttttaagcaagatcaacacagattggagtacttgagaaagacttcatgaagaaaatgaagcctgacttacaacagaatgagaaatctactcaatgaaatattagaaatgacaggaacctggagataattcacccaatatctctgtgtttgttggataataatagctaatacttgtgtaatgctcacgatgtgctagttcctcttctaaacactttataaatatcttaatgcagccaatcttcataacatccttatttagtagaaactattatctctttcttttggtgagaaaatcgaggcacagagtagttaggtggattgtcctgtgtcacacagcagccaagttgtagatctcgctccagagtttatactcttaaccacgatgctacactgtcttgtagctagagctgtgtgccaaaactaagattgtcgggagcaaaacagtttgcccatagtaacaaacagtgcccaagtagtgacagaactggaacgatcttccttggcacctaatttttaatacatgtgtgcttactacataatcgactgggcttctcaagatttgtatgatttacccagtgatgaggggagggcctattaagttgggacaagaccaggtattaattgctctgtccatcagagagaatggtagcagtgtttgaatatagacatacacactggatagcaatgggaatgaagtttgataggtcattttgtgggctagcaaaagtcagatgtattcaaggtttatctgaacaacaacaaatgggccaacctggaaatttctgagaatgaaaatgtcgtgttattggggaggagaaagtggaaagaaaaaagcaaagggtataatgtatttttgtaaatggattttagtatataggcacacttctagttaaccatatttaaaacaaatacatgctaaacaatgcatatataccagaaattttatgtcagtggaatcaaatgtagtaattcaaagaaatagtcactggctaagaatttatgtatgccttgtatggtaagaggagaagcaggctttatctgacttaacttttatccctatgcacaccttcattttacaaagcttctatttacttcaaagaggtgaggaggagaatgcaaaccaggcctatcacggttgtgatcataggattgttttgcaggtggtatccatgtgtttctccaaagttcatcttttctatttgcacacttggaaggaaagcagagcgctctttcatcttcatacttttctagttttttggaactatcaattacaaaggagtgctgtataaatcttctttgtgtgtttaagtgctaatataagctgctgaatatatcagctggctacagtatttgatacaccttacacctggagttacagcagacgctttggcagagctcattgttctaaagaactagattataatgcagaaaataaaataagacagaaatattaaaaaattcattccatatgcaagtttccaccattgtattgtgttggtagacaaccaatgctatttgttgtcattgtttaccatcctctttgatcaccaagttatggaaaaatgattatccctataattgatttgtgatctagagcaaacattgtaatacctgttcattcaaatgggcttgatgccaccatctaagcatctcaaaaggttacatttaaataggtgccttaggcctgtaatcccagcactttgggaggctgaggcgggcaaatcacgaggtcaggagatcgagaccatcctggctaacacggtgaaaccccgtcactactaaaaaatacaaaaaattagctgggcatggtggcggccgcctgtagtcccagctacttgggaggctgaggcaggagaatggcgtaaacctgggaggcggaacttggagtgagctgagatcgcgccactgcactccagcctgggcgacagagcgagactccttctcaaaaaaaataaaaataaaaaataaataaataaataaataggtgacttaggtttacgtagcagtaaatatagtttgacgttttaaaaaaaggcagttaaacattagaacacttgagtatttggatatacctcctcatttaataatagccaccttaataatcacatcttaatttttttgacattttgcaatttttcttggagtcttttaaaaattttattaatccacagaaattagtaactgatatttacttaaatgaaatttatgtgacaataaaatcaaacgcagagtttgtttcctatgtagtgcctctgtatactgtatattatgtataacataaagacttgcattgtgcaaggattagtatgatttgatatgtattttgatgtttctacaaaatgctctgcccaagatagaagtaaaaagatttgtaatgttcaagtattattgcttccatgctgagattttctatttccaataacacctgtacaccactgctacctagttacgctctacattttatgcttaatgtagtaatctaatttccccttatttgcagttagcaagtcaaagtaaaaaatatacattggaatgttgccatgacactattgctatggaggcaaatttagtaacaggtgaactatcttggttcccatcagacaaggcttggttcctgaaggatggaaatgatcttattatatggagttctctcctgtaatatagccttaagggtacactcctggaatagtgtaatagggagactctagagccgataaaaaaaaaaatcctgtgaactagcagctgggaggttgtatcaacaactctataaagtgtaacaagaatttaacgaacatttaagaaggccttctggattattataaatagggtgaaaattaagaacatttcttaggttacaagtgtatgtaattagtgaatacttgtataatacttgattttatattttcggctattgtaatatttctttatcactagatcatatcaactaagtcaaatgtaattgtaatttggtataaatatgacttaatataaactgcatgcggggtattggtattgaaatcagatttaacaagctgcatatctatgattacagcacttctcagtaactgttcattttaaagactgtgcaggtggacaagagtaatctcttaaactccttatgaaatactgtaatttggcttggttcatttgtgattcagaactcccaaatggatcccgatgaaaaattagagatgtgttcttgtagaaaaaaatgagtgttttaagaaatcacaaaaattactcataatatgctaatataattcaaaaattcttcattccaataatagttttcttgggagtacatcctctaggtatggaaatgtgatctgtgcattcactgatccaatacatttagttcctacaatacttgcaaagtatttaaagaggtattcaaattagtttcttacataggtgtcttacacagtgtctcctcactgtgtatttcatggccaccgttaagtctctccaaggctttcttgcttggctttccttgtcagcatttggcttgtttgcttcttgttgtattggcaatggctgggtttgtgtcagcagagactcttagagttcattattctgatgtagctcttgtgctgtaaatgtttttaagttaatatttattttattgttaagaaattaaaaaaggacttgactgctttaaaaaaaagtggccctgcccaatcacagtctttacttttgtatgtcatacatctccccttattttgaggggggattcttaatctcatacagttaaatgaaaaattttcaagttgggtgaaatactttcggtagaagcttttctgtaagagtggcagttcctcatggaaactccttcaatatacattgaattaaatatcagaagggatttttaaagaacattttcaaatttattttggggtaaaaattataaaaatgttgtgccaaattagtagttggttcaaataaaatgtttttgcaagatttaccccagccagtattaacagctgtaacaattgagaccaggtgacagaaaatttcgttttaagaaggtgtttattgtcaggaaaattgtgaagtttcctttgtaattactctatctttgttattttggcagcctgtaaagttttattggcatttactgaaaggtactttttttggccctagccagctggctttctttttttgggcaaactttcctagctctggtattcagaacatattttcagctttgattgtctaccaatggggttgttttgaacaaggagccaagtgactagtgatgtctgaattgatctcaatcatgtcttcagtagggtgacatcagaatgctgcaggtgtacttcaagcattgagggttgtttccagcatgtcattttggtgctaaaatagtcaatttaagaccattcaaactacagatcctttttacatacagactggaagaaaagtatgtgaaatgatgtatcaaaagtgaggattcaataactcaaaagagaataaaatttttcaaacaatataggatcaccaaactgagattgaaagatcctttccaggagctaaatattaaacaggtaatgcacaaacatttgaagaatggaacgataatagtatttccctagattcatgagtatgttgtatagatgtggagttttagtcgtcttggtgttggccttctccactttgtaagccatgtaccattgctcttacctctgggcttatttgaagaattgtttagatcatgctaatccgtgtgagatgaattctaaatttagaattatactgctctggttctgaagcccacagtaataaattcatttaagcaagtatttgcatcactgattacttattttattgcctttaaaatactgctggagaaaatgattttattttatttcatgttaatacatttattggactacttgttgttagtgagtaatacttacaaatcttagaaatgcctttttagtagttattatttcaaagccatgacaggcatattagtatttggtagtcttctatggcaatgcaatattaattttgttttgtatgttactatggcgcattgataaaataactaatgtaaaatcttaaggtggagctcctgtgtttgtgatttaataaaaaaggaaaattaaagatcatatttatcatttacttctgaataagccatcttgagatgctacatcttcatccactatcgtctgtttatgatctgctttcttttttgtagcactggatttcaaggaatatatttaccactttgttctaaactatttgttagagatctatacagattgcctacagaggacagcactgtggaatttgttctggcatcctggtggaggtgtgggggatgcagggtagaaggaagcccacctttttctttcttttttttttttttttaacatgttcttatgggaagaacctgtcttcatagtcactcagtagccaggacaaagcacctctggtgtctgcacattctgcaggcccatctgccgtagcattcctcagtacttcatcctggcctgagaaacacccggaagtgctgggatcttccagctcctactcagctacgaataataacaaacacttcccagtctcttctaaatatgtattgtccattatttgaaacaaactacagaattactaggcagagaagagatttttatttttggaactttgcagggcttaaagagtgtccctattacagcaaagtgggacaatttctgtagaagaggtgtttcaatattcataaaggtcataattaggtaatttattaagtatagcaaattttgagaggtgtggatttggatgggtatcttgattcaggcacttcatttcaatttattagatctgtttctcaaatagctccagcttgttcaggttttattcctgccagttggatatgaagtactgtatgtttgggctccctgtacagaatttgtttccaaaaaaatagtgtcgtgctgctttccatctactggaccagtaggggtaggacgatctgatttgaagccagtgcaaaatgcaaaactgattagatttggattgttcatacattaggccttcctttccctgttcttatcctttttccagatggaagaaccagtttcctcccagggcactttctcctggcaattagactgtgaagatgaggatcatttagtaccactactgctgaagtaccattatattaagtttgggctttaaaatttagaggaatgaatcaacatattctgtatttggtctctttattttgcaattaatgacgcttgtgatgcttttaaaattaggaatctaactttgtctttcagttctaccttttctttattaatatactaacatcttactttcccacatttcctactgaaatgtgggaggtccctgtcccactgaaatgtgggaggtcccctactgaaaagtggggggtccccgtagtcaaattttaaagcatcaagtgttttaatatgttaaccgtattacatgtacctctttctaacgtgcattatgtaccctccctcccttcttaaatatagtacttacacccaattttgctttttcatggtgattaagggttgccattatgaacattggttgccaccctttgctaaaatgcagcaaatgccctcagttattattgaggcttgtagagctctgtgtgtgcccttattagtaaatggctttagaatgttatgcccttggaattcttgtaccagacctttgccattttcctcttctctcttacatcagtaagtaagcaggcacttacacgcaggcattacattttagagctataaaaaagatgacttggcctaatggcttcagcttgcagattaggaatggaagcccagggaggttgcacagttagtccctgattatgcagctagctggggtaggaactgggtagagattactcgactcctaatccagtgttctttcttccaggccacacctttcgctttttccttctgtcgggataccttgtcctaactgacgttttccatgtttatttatttatttatttattttgctcttagtgtgtagttgactgatagagaaattggaaacaagattaaatagaaaaagtagtgaagtaacatctgatggcttgaagctctgtttctacgagtcagtgtacatccttgagtctgtttgtcttctgtataaggaagtggttggactaatactagtagtaacaaacatttactgagtacttgccacatgtcagctactatcaagttctcattatgtgttacgtcattaaattcttacacagatcccatgaggaagttctgtggggtttgtgactttacaatatttgatgttataattaataattttgatattacaatatttgatattacaaaaggggaaactgagtaacacaaaggttacctagcttaccagaagtccttcagttagtaagtggcaaagccaagatttagtctccatgttcgtaaccagtcagcttttatgtggccgggtcatctatatgttctcttttggctgtaacacttgatgattctgggtttgaataataacaccaacaattaacatcattaaggactcaatacacactttatacgtagtgtggctcccttagtcctatcggaaactctatgaggcaggtgctgttattatcccattttatagatgagaaaaccgaagtacagagaggttaagtggattgcccagtcttatagttaacaagtggcagtggcaagatttggaactaggcagatttaagtgcctgctaactttgccactatgtcttattgcccgtgagcaggtacttgagtatttaactcatgagtgtgacataagttttataatatttatttttgccaattagagatgatgtgtatgtgtgtgtgagagagagagaacatgcacatgcacatttacttgtacatatgatgatttcttatctatgtgttaaatagggggtaggcaggctgataagtgagtgaagtgaacttagcccaagtggtatggggaatggagtggtggggactgtgggactgtggcatataggaaagcacaggtcctggccaaaggggcagctgagagtggctcagccaactcctgacctgtttttcaagcaggaaattggacccagtattgctcgatattgtgtgtgtgtgtgtgtgtgtgtgtgtgtgtgtgtgtgtgttcctagagaagccagcagtttggatttctaaaccagaagattttgaagctgatttttaaatgatcacagttaattggttatttgcaaccactctgaaacaaagaaatgttgtcaacctctgagttagatcatcagggctgggggaaagtgaccttctgaaagtgagagttggccacatcttggtatccccactactttttgaaaagatgaaagatggaccccaatctggaatacttacccattctcttctattaagatgttatggtattctccaatgtagagacagttgaatttttaagtctgcttttgagaaacagctgccttatgaggctgcagcattcatccgaaggccaccagtctgtcctcaggtctagtttccaagtctgtagacacctgatcacttccggggctttttcaaactgtatctccttcatttaggtacaccctggcaagactactcagggatccctgcaagagagtgtgaagttactgttactggtaggagtttgggatctctctctctctctctcatacacacacacactcacaaaagtttgatgctcccttctgtgaaatgagtttcgagactcagcacttatttttgaactgcccaggaagatccttgcacgtgctaaggatctacttcaggaagcaaggtgggggcatattgatgactgcttgccttcccccataaaggtagctccactctcatctgttttgcacattgggcttccaattgtgattcctttagtacaaaggtctccgaagctaaaacaaacactggctcaatcctgaaaccttaatcatatctaatgtctgcttcagtttaaaaaccctgatgttcctaaaaagggatgagagttcacataacttttcccctgtgttgccgaaataacttccaggggcagactgggtatctgatctctgcagactgacaatactcctttaaaacttggtggcatttttgttttaatggctgctctccttaaagaatattatttaagaaaaaaatacatatcaacttgctgtgctatggtctaaattcctgtctcggaaatattataggtgaatgtatttccagatgctgcaaataatggaaaatcatgaaaactcgaatcagggtccctgtccttaaatgtgtttcagtttgcattttgatagcagtttagaaatgttatcgcttgttttgtcacagacataattcacatctttcttcaggcactgtaaacaagagaaatggtttaatggccccataaaggcactctgctgatggctgagattaggccctttagtaatggatattggtgtgtgtatgtgtgagtggtatatgtacacagtgggggtggggagggcttggaagaggtaaatgtactagaaagaatctttgagagcctcagatgcagctgaaaatgccttctgcttctgtgtgtcttagaagatggattcacaaagcatgtgacaccattgtctttatttatactcaagccttcccctttgcttctagaatttaactgagcactaattgaggtcattgcgatccatttattacctgaaattgaagtgatattaacttaaagtgaatgcttttcatctactgagtgtattcctaactacatatatttgtataaaaggctgtgtgcatttttcatgccatgcttgtatctggtcttaaatatatctaatttatgtataccatttacttctcccctcccttttacagagatttttttttttaaatcactgctatagccaagtgaaatttttttttacaagcactttagtatccacactatgatttgttttgactttttcagttatattttttagacaggtgcaaaaaattctccatgttatacatcatcaccctgatctaagtaaattccttgaaatttctcaaagcacataaatttgtagttttagtctcaattttgtgtcatttttttaatcagctagtttgtgtatattgctgtaaaattggctacacaaggctgcacatttttggttttgagagacagagtaaaccaagagttaagagattaaaattaagtgtcctttgttgactagttgagctgtctctgtcactagcaggtgtcactttccatccagccactttggtgttttccttctcctttttttattatagactatattctggaacaggaatcagcaaacttttctctgtaaagagtcagatagtaaatatttcacgctttgtgggccatatggtttctgttacaactactccatttggccattgtagctcaaagtagccctagactagaccgaaatgaatgggtgggagagtgttctactaacgcttcatttacaaaaacaggtggaaggccggatgtggcccatgagctgtaatttgccagcctctgttctagaacagcatacagaagactattctaaaacatgatttttgaacagaccagaaaacgcaacctcaaaataaagagactgtcttcaaggctcttcctccaaaactatggattttatttctgtttagagaagaattaaaaatatgacgtgtttctcttcccagggtaattgtttgctactcacagaaactgataaccctatttcactcttaagacaagagttgggaggaaagcagagtgaaaggtcagagccaagacaacttatcactgtatttactttcgctgtccacatatagaaggagacctttccatcattgtgacattttggttatcagagtataagggaagcttcaactgttgaatagcaacattcttccttcagtggaatatgagtggtgtgaatttttaaatgcctttggtcacagtaataaattgaaagaaggcagattgcctaaaagcaaacgtgaatactctgagaagtgtttttatttagatacacgtgccaagaatatagtactaaggtcatacatacagatacatgtatctgacacacgtgaattagtcaaacttaaagaatactgcctaatgtctttattagggaatttttaaaacaccaaataaagctctaattggacttccatgagctcttgataataaggactgtgtcttactatttatcttcattccatagctccatattccttcaccctctcaggacctgccgtagtgtctggggcatggtagatgaattaacaaatgaattaatgaattaattgctgaagaaatgaatgaataaaaatctcatataatgtgatagtggtgctcatgcatgaaggaaataatgagtgtctgtgtataaatcaatttgaattatatactcaagagttcaacaattacaaccttaagattgagcccagggctctaattcttaatgtgttatgacttagtgttagatctttagtcagacatggtgcttagcttctttgtgcctttttaaaagatctgttaaatgggaattattatatatgttcctgtcttaactgatgagaatcaaatagagtatgggacaattctttgaaaatggttaaatattatgtgtgtttgagtttgtttttttttttttttgtatagttagtgttttctattaggattacaattagtattttctattagaattccaaactcaaccagtttgttaagtcaacacttaaacatattatctttgtttaatttacaagacatcatccatcatcttcactgtaaaaatataaacaaaaacatacatcattcatagatttcattgttcattctctggatttacattaaccagtcagttgtaacaaacattatctgttttcaatgtaaggatacaaataatgccccaatgttatgattgtttgggaagttattctcctatgagcaaatcttaaattcatattctcagccaggtgtggtggctcacgcctataatcccagcactttgggaggccgaggcggtctggagtttgagaccagcctggccaacatggtgaaaccccgtctctactaaaaatacaaaaaaattagctgagcatggtggcacacacctgtaatcccagctacttgggaggctgaggccggagaatcacttgaacccgcgaggcaggggttgcggtgagctgagattgtgccactgcactccagcctgggagacagagtgagactctgtctcaaaataaataaatgaatgaataaataaataaaataagtaaataaataaattcatattctccccttatatttcaagtgttcaaatgtgattttacattatgtatctaccctcaaccaaagctgtagttgtataccagcattgttgcttttagaaagctcagggcatttctatcctctggtagaataataatgacaagattgtgccctctttctaaaatataggtagaaaaaattgaaagcaatgatgtgtcatagttcatagttctaaaatgaaaacagttactagttaagcaaacacttcatgaggaataccataaccccaagtaaacttctgaattaagaagtggttaagtttattttggaagtgcattttttaaagtcttggtattttggagctcttaaatttaaccattagaagaactcaagtgatcattagtcagccttaagatgtggttttaaaggtcaagcttccatcaaagaaaaaatgcaagacacatctcttgagtgttctttctgcctttcctcccaaaaatttgattgtccggaggagttgtggatcataaaagtttccatggaaaatgtgtttgaagaatgccagaggaagactgcagattttctagataaattatctgacctgtctgaagtcagggataaaaaatataatatcattttgaaccaccactttgcaaatgaaatgaaggagtcaactcacttgatttggtacacttgaagaaggaaagattcactttaattaaaactacaaacaacgcagatgcctgtaactctgttccagactcagcaaggatggtactgtaagagaaatgaaaagtacctagcagcctcggcagcaggctggagccgtgttcaacgaaagtaatttaattagtgttgatcatgactccagatgatggtgatttgataaggaataatttagtacttaacagccttttacatgcaccaactccatgtgggaaggtaaagcaaattgcacaaaatgaatgtgctgctttcgcttgtgcctgtgccaatgaactggaaaaccgcctgttagcagactcagattctcagccctgtgatgaaatacccaacacgttttcaactcagccctctctaatgggagtctctacactactcttatttaagaataaataagagaagtcatttttgtgacatagaatctccaggaagcaggaaagttaaaataaggaaaataatgtagcctacggcttttgtgctgtaagtcgaagatttttaggttggctttctcttttttcctcacatgcagcaattcaaaaaaaaaattttttttgccaactcagattcattggattacttatttggcttatgattagaaaaaaaaaaaatcagtttcaagggcccatagtgactgaggcccacataggttgaacctgttatggagagagttggggatctcaaaactactggagcgggagaacttgtaagaatccttgagcgttggcatctaaggaaaaggaagatgttgctggattttttaaaaaaactcttttcaactactggacctatttgaatgcggcatacatcagatcacagtggattcaaatttgctcaattatgagcatcacctaaaaagttttataagattcagaatcctgatacaacccagctctaatgaatggaatttctgggagtggtgtattaattttctcgagctgctgtaacaaagtatcacaaactgggttgctttgtgaaatttgtttcacagttctggaggctggaaatccaagatgaaggatgtcagcagggatcggagggctgtgagagggaatctattccctgcctcttccctagcttctggtagtttcctgggaacctctggcattccttggctggtagaggcctcactcttacctatgccctcattttcacgtagcagtctccctgtgtgcatgtctctttatccagattcccccttttataaggatactagtcatattggattagtgctcaccttaatgatcttatgttaatttaatcttccaaataagagattctggtgttgaaatttcaacatgtaaattttgatgggacacaatccaaccaataacaaacgaggtctgagaatctgtgtttctccagcagctccctagataatttgatgatgtgccagatttggggctcctgtgttcagggatcagcttgcctctgataaccctttgagaatccttatgccctgcagtagactgaatgtttgtgtccccgtctcaccacccccgccccagcaaattcggatattgaaacttactccccagtgtgatggtatttggaagtgaggactttgggaagtgattaggttatgaagatggagccaatgggattagtgcccctattcccttactaaagagatcgcagggagctcacttgtgatttctgctatgtgaagttgcagcgagaagatggctatctgtgaaccaggaagtgagcttttaccaaacacttaatctgctggtgacttgatgctggatttcccagcttccagaactgtgagcaataaatacctgttgtttataaaccatacggtctatggtatttttgttacagcagcctaaacagactaagacatgccctttcttctaaggtcacttcgggaaactcactgggccaatctgaaagcagtagagcactaaatagcatttccactagcatggatcatgccttttgcttctaggtccatgctaatggacattttgatagaaggctgttgttatgctagcagccattcctgatggcaccccaaacatgccattcctctccaccctccatttcctacccatctggaataatttctcctgtgaagttgaagcacattttcagatgtctcagctgggtcagaaggccatacatgttcaagtaacttaattagtgtagctttgattaatgtccctcagagttttttaaactttatattgatatacattcattataatgcaaaaatctgaagtgcatagtttgatgaattttacatgtgtatatatccatataaccaccacccagaagcaagatataaaatgtttccagcaagatatatttccgtaactttgtacctgtgagatcatctgtttttgcatgtaatttgtccctttttattcctgtattcattccattgtatgcatatgccatgatttatttatccatttgcccattgatgaatatttgagtttttccagtttttgctatcatgaataaagcttctttgaacattctcacacatgtcttttcatgaacatatgcacccttttttcttggatgtatcctaagggtgtattaatggatcatagagtagatttctcttgccctagtagatattgccagaaagttttccaaagtgcttattatactaatccataccctcagcagcttgtataaaagttcccattgcttcatgtcttcaccaaaacttcataatgtctatcttttgcaggttagtcattctagtgatatctgtaactatctgatacagctatatagtgataatctcatgtggattattttgcagttttctgaagaataaagattttaaatacctttgcatatattttgttgtcgttccgatttgttttgccatctggatatctgcttttgtgaactactggcctgtttcaagactttttgcccattttttaagtggggaatttgtcttgtcttactgatattttgcaattcttattttgttaaatgagttcttcatcagatctttctacttaaaacatcttatagcttgtgacttactttccttttttttaacagtgtcttttgaaaaagtgttcttaatttcattgaagcctaatttgctgatattttttcttttatggttagtgctttttgtgtcctgtttataaatattttcctacttcatggtactcaagacttaaaatatagtaatattaaacattatagtctccaatatggctgacattttgataaatatgataaactttacatcatactgcatgcatatttattagctatagagttcatcaatttttagtcatgtaaacctgatctaatctctcaagtataatatgatttgttacttgaattccttatatgtcgctgctcctttttcttatgaaaatgtaaaaccaatacttaatctgaagtgctaaaacttggatatatgcatgttctcacttataagtaggagctagatgatgagaacacatggacaaaggagaacagacactgggggctacttgaggatggagggtggaaaagcgaagagggtcagaaaaaataactactgggtactaggcttagtatctgggtgatgaaataatctgtaccacaaacccccatgacacgagcttacctatataataaatctgcacatgtatccctgaacctaaagtgaaagttaaaaaacaaaacaaaacttggaaatacacactttgctaaatatgttcaaagatgtaataaataatcgaaaaccacttgtttaaaaaaagaggccgggcacggtggctcatgcctgtaatgccagcattttgggaggccgaggcaggcggatcacgaggtcaggagatcgagaccatcctggctaacacgatgaaaccccgtctctactaaaaatccaaaaagttagccgggcgtggtggcgggcgcctgtagtcccagctactcgggaggctgaggcaggagaatggcgtgaacccgggaggtggagcttgcagtgagccgagatcgcgccactgcactccagcctgggcgaaagagtgagactccgtctcaaaaaaaaaaaaaaaaaaaaagaaatgcatggttaatgtattacaaagctgtgtcatttagtatttcttattctaagatctcgcctacacacagacaacacgcagatatacaatgggagacaattttcttactttatttatttatttatttatttatttatttatttatttatttattcgaggcagaatctcactctgtcacctaggctggagtgcactgccgcgatctcggcaaactctgcttcgcgggttcaagtgattctcgtgccccagcctcccgatagctggaattataggtggacatcaccatgcctggctaatttttgtatttttagtggagatggggtttcaccatgttgaccaggctggtctccaactcttggactcaagtgatctccccacattgacctcccaaagagctgggattacaggtgtgagccaccgtactgggcctagagcactactttaaattcttcgtgggttttcttttcacatttaaaaaatgtttacccaggaaatttaggacacatagacaaacgttaagagaataatgttaattccctcctgcccttcaattggcttttaccatttatcaacatttttctagtcttattcatcactttcctcatacacaattattttttctagagtattttaaagaaaattctggatattttatctgtaaatattttatgaacctctaacattaaaactttttaaatacaactattgtcacatccaacaaaattaacagacattaaattatctaatagctagtctatactaaaatgtcatttattgcagagttgtctttttatagttggtttgttcaaatcagaattcaagtcctcataattgattcttgaggctcttaagccttttctttcagaagaattagagctttctgacttggtaaagttaatgcacatgagtattcttgatatatggagatagacaaaatttctcttttttcttttctctttactttgaataggcgtactaaacatgtatgtacacacacacactacattaaaaaatgctttgaaatagtgtaccaagggtaattattttattattatgtgttaagtttctcttagatcacttaagtaaaatgtgcgtatttggcaaatttgttttctagaatatttcagatgactcttgattgctgttgaacacttgtatcaaaattatatgcatataaaacaaatagtatttgttttcctgaagcttggtagtttgtgatatcaaatttttatgttaaaaattatatataacattcaagctaatgcaagtttataattctgtaatgccgtcattaagattgaatgacaaatgacatcataaaccacaaaattcctcttgtcatatcttcctttttggaaagcggacttaacatactgtgttttaatttcagtttctataagagttagaataaatctccagaacgtgtgtctctgttatgtgtttatcccttgactattcatacctgtggatattatatgtaaattacagaatctattcttatgattattttttccttttttaaaccaatttcccatttataccaaaaatttaattattctgataagatttctaataggcatttcttcagtttcatatcgaagaataaaaaatatatagctttttttttcttttttttcttttttttcttttttttttgaggtggagtctcgctctgttgcccaggctggagtgcaatggcatgatctcggctcactgcaacctccaccttctgggttcaagcaattctcccgcctcagcctcccaagtagctgggattacaagcacctgccatcataccggcctaatttttgtatttttgttgagacagggtttcaccatgttgctcaggctggtcttgaactcctgacctcaggtgatccacttgcctcggcctcccaaagtgttgggattaccggcgtgagccacggcgcccggcctatagcatgttttttatttattggatttacagctgtgattccctccccatatacgtatttttctagttttcatattttgtgatgtagctttgtacgttattaaacataaatgcatataagcattactgtgcattaagtcacagtaaaaaggtgaaaacatcatttcatatagaataattgtttcatggtagattacatgtgacaaacaacatttacatatttctcagatttcatcttcacagttctggtaattagataggcagatacttaatctctattttatagatgagaactggcctcaaagatgttgagtttttgcccaaagtaatatcagtcacttctggacctgcgcctggattttctttgccccagtctagttgtcatttcattaaactattattattgatgcagttgatatattttcctttcaataatgcttaaaattatattttggtctttagttgattcttggctaatcatctgtaatttttctgctttagtcattggaaacctttctgatatgttttcaaaatgtactttcttgaaactgagcttctagcattgttaatatcagttaagcaaattacaagtgattcacttaagtaatgagagaaaattcaagcatgcattttgttacacaataaaggcagaaaaggcgtatatgaagattctctgaaatcttctgctactgaaattcatcaaacgtgatttttcttacatatgtaagttaatatgaaatgtgaatgacctttttaacaagagaagtagaacacattaatctccataattcctacagcatttaatttttgtggatatttttgttcttttttctagtggcttttcatggcctgccactgaaaatcaagaaagaaccccacagtccatgttcagaaatcagctctgcctgcagtcaagaacagccctttaaattcagctatggagaaaagtgcctgtacaatgtcaggtaaagccaccaggtgtatgtatgtaggatagtggttcttattgaatcaaaaagtccagaataatatgaaatctcaagtcatattttatgagtaacgtctttaatatgtaacaagctaattaggtaatgcatttagcagaactctaaagaaccatttaccatccaatcacacactttggattcattttaaagcaataatttttatccagatcattagttgcttttctactgtagtgatgcatcttgggtttgaaaaaggggttttacttggcacaagcagcttttgaaagttcccattagaatgaatgcattatacactttagatagagagtttgcagaaaaaaatgaaacatttggcaggtctgagcagtacattagttatctgccaggctttgcagatgatctgtaagatgagttcatggacaattgcaataaaactggaatttcataaggcttagcagaggctattatctattaaaaagctggttgttcttctgatgataataaagggtggtgcagtaaaagtgcattgttcatttattagaaaatttgatcacatatatgttcattaaaaacccttcaaagtaaattgtatgatgctacttttcatattggcctttaattgcataaagaaaaagttggctgtctctactgagtattatcactctcaattacagtagaaacttagttcttaaaagaagttagtttgcaaacttacacaaattattccaaatattcatactgttttataagttatatcaattcagattcattgtacattatgacccaaaggggtcttctattaaataattcctcagatatttattgcatacgctgtttatgtccaagatatgtaagattctagaaacataggccagacgcagtggctcatgcctataatcccagcactttgggaggcagagttgggcggatcacctgaggtcgggagttcaagaccagcctgaccaacacggagaaacctcgtctctactgaaaatacaaaattagctgggcatggtggcgcatgcctgtaatcccagctactacagaggctgaggcaggagaatcgcttgaacctgggaggtggaggttgctgtgagccgagatcgcgccattgcactccagcctgggcaacaagagcgagactccatctcaaaaataaaagagaaacatagacttgtgccattatggcagctgaccaatgctcagatattttattaccatttgttcttgcaaacttgtcttttatatttgcttttctaagaggttcaccagagcctgaaattatgagctagctcaattgaaactgcaaagttttataaaaaaggtctcttgtagaaggtaactattaaagcataatgagttcagataagacagtattgatcgatctgagttttattttatagtttagttttgtttttgcattttctccttacaagtactgtgtatccacagcataattatttaacatattgaggaatttctagtcaatggcagttagatatagaattgtcattgcctttcagcattaatcagaattgtgactgtgaaatcatcactgttttatatgccatatctgacatccacaaatcaataataaaggaattgcctgaatattttgtgtttcttttgggggatgaaaagtccccacagtgatatatggcatatgcaataaattctggtacttccatcgctatacagaaaatattattgagtacagcatttcatgggggaatagtatcatttgtttcttcattcatgagaatgagttaggtgaaccatttcacaaaagaagtgggtttttcttcagaaatactggtaaagaacataggtggaaccaaacatgcaattcattatatgaacactgttgactttgctttgaagcaagagctgccttgtgcagcatatattcctttactccttgtaaaagatttttgcagctggatataattccgttgcattgatggagcaacagaataaattattacataatttaattcaaaaagaaatatttctttctaaagaaaaaagtgtactgatgattgctttttattttattttacttatttttttttgagacagggtctcactctgtcagccaggctggagtgcagtggcacaatctgggctcactgcaacctctgcctcccgagttcaagcgatcctctcacctcagtctcgtgaatatctgagcctacagacatgcatcaccacgcccagctaattttttgtatttttagtagagacggggtttcaccatgttgctcaggctggtcttaaactcccgtgcttaagcgatcctcccacctcagcctcccaaagtgctaggatcaggggcatgagccactgcgcccagcaaaatgaaatacagcattctaacttagaaatgccctgttgttaaaaaaaatttaagaaaatttagttttagtaaaatattttatagatgaccaaaattagctaaatcacattcctgaaagttacacctaggaaagcagtttaaaatcataatgtaaaatcaagcttactcattttattcttctgtaactgtgtttagaagttagactataataggattttattcctaatgacattattttttacttattctctaagaaagtttaaatatatcagacattttaatttacctcattaatcttcattatcccatgtggggaagttaatgccaagcatcatttatttaatataataaaatgaaaataaagtaaaagcattgccttcttaaaatcccaccacaaataaaagcaagccaggtgtggtctctgccttattaagctgatgttagttcttgttttaaaatcttacataatataaaagaagaatataatatcagaagtatttaatgatttaggaaagatctatcaaactttctcaaatagatatatcaagaatagatggaaaaaataccactgcttttttggacgtaattttccctgtactaagttgtttgtatatgcattaaaaatacacatttaatatttgttctgttacaaggttttgcattaatcatcctattttctgtttaagggtgttgtgattttgaagtttatctgttctggatttaaacaacaatagcaacaacaaagttttcatttccatttgacttaagtctaaaatatcttttcttcctttggattagaaacttttttaaaaaattgctccaaagaaagaaatgttctctcttcttttgtcccctgggtagtgcctatgatcagaagccacaagtgggaatgaggccctccaacccccccacaccatccagcacgccagtgtccccactgcatcatgcatctccaaactcaactcatacaccgaaacctgaccgggccttcccagctcacctccctccatcgcagtccataccagatagcagctaccccatggaccacaggtaacctgcagataccagttttctagaaactgttttttgcgttcttggaaaaaatttctattaacaattctgaaggcctagagtagatttaaggtgagcctattaattttgcacatctgtgcaaaatatttttagaaagagctcactctatctatacttataatttgtggagaaagtcatttataaacattccttttataaacatttaaattggttgctaaaatggaaaattaatctatctactgacatttgagcatttccctttcgctttgcttgaattaaattgcttcacttaaactttaaatcagatcatcccatttttatgagcatatgtgtgtacttgttctgtaaagttaggagactaattttagtaggtagcttatggaattaggttttctaccttatattgaatggttcagctgtacatagttttgcagaatataacttatttgattaaaactgttgaccatcttttccaggtgattaatatttaatatcagtagacgcatgactctggacactgcgaatatacaattaaagagatagagactcaattagtattacttagaaaggagcaaggcaagaagcatagcatagatctaaggagaatactgcgttaggtaattcatgactccttgagattaagaaattcatatttaagtaaaatactaaataaaacctgtagaggttctgagatgtactaccttaatatacagcttaaaatcaggttgcttatatacagcatctctccttctttatctcttctgccctgtgcttctgtatgcagtggcgtgctggtaaatgtttagcaacagcctgcatgagagaaaaacaaaacgccctcatcagtagcttttgctgggtctgtgatatacatattgctttcatggcccactacgagccatcactgtgagaaccctgaatgccgagttgcaaagatgcaatagcacagcgtaatgtagtatttctagcatacggataccagagacataagtaacctcaggtgtataattggtaatgaaatgtagtaagataattagaaagtgatgagttttgcatttttatcttctgtttttaacatattttttgattgtgaagttatataatttaactgttaatagtggctgtgtttaagaactggctcaaaaaattcctgcaagtttgacaataagtcagtgcaaactggccctgagacaccgttgtaaaaataactcagccaaaggaatcttctagatcagcagaggaaagcagaagatgtgccactggcaactttctgaaaataagggagcactcaaatgtgctttttataggttttttcatgggactcaatctcaaattcagaaactcattttgctataaagggcgtaagatgaaagcgttctttacaatgtgatacaaagccttgtcttttccacccttggttccatcactaagtcctcttgtggggtagttattaaatgcttcctattatctttttcttctcaccctgtagccttgagactttgtcagagtgcaatggtatgtgcatctgtgtaaacagttttgtaaatacagatgaaagaattcttattgcagggtgggccattaaacagatggacattgtgcagagctgaaagggaacaaaaaaatatgaacaaaccaagttttattttctccactactggtgacttctgagttcttgataactgaatctcactcttctgatcagtgccagaattatagattgtataattcgctttttgtgcaaactggttatttcttagggaaggtgcctgctgaataagcagtgtgcctggttttaggtgacctaacttgaaatgctttagccaaattcattttagtttctctacttgaagtcagatatttgagactgagaacagccggcccggaactccaagagggaagctcggggtcttttcccactgacccctgactgagttttgaggacagtaccagctggccagtcccaggaaaatctctaaagccgtatgtttctgaggaggatttcttagagggctctggccaacaaatgacagtccctcagttataaatggcaaatttgctctgggaacagatcctttccccaaaacaccccctccagccaggcaccccacttcactctgggaatgctttacggccaactggcctgcaccctgcttcctttcctcagcctcactctgctcctggggccagccctttggcactttttcctgaacccactgtgcaggagccctgtctctctttctcagtgtttccaccacttacaccctgtttttctttatctgggagttcatcagcatgttctccttatctgttaactcctttccagaagcttcttgaatcactttctctttaccattggtcagtggctcctaagaattgcaccaaaaccttgcaaattcctgagaagcatgcgtgtttgatatatacatgttccccagcaacttccaactggaatcaggtcgactcgtaaaaacaaatggcttgattccttacaaagctttcagttacaagtattattaacttccttttaaggcttcacaagtgagccagtttcttattttaacttcaagttacaattttctgattcactccttgacagttcttaatgataatttctgtttctttttttggctaatgaaataagcaagagaagggaaatgaatgcagtgccagtcagcctaactgctctgcaatatccgagtttctaagtttattttctgcaggtgtaggtggaatttcagtgctttccatgaccaccagtgagcctagagttaaatcacaggatggagtgttcttagaaatgctaaagcaatcgctttgccattctttagcttttaccttatttttatttaacattaccgaaattaaatgctaactttccaaattaaagtctcaggaatgcttttagtgggggggttattaggcttatatttgctcatagaaatgttttataggttatttttaagcactcctggggcatttttagagcacttttaaatctttaattaatccacatctttgtggtgggtcaatgatattatggatgagaaacacagaacagaacgattatgtgattagccaattgttataaagtataaccaagaacaaagaggcataggactcatttctagccttctgctgaggcctcagaacttcctcatgtcctaacagcgggacttgccccaaacctatacaacactatatgttattttcacctttggagatcagctgtgcatttatgcttatttttatcaacctgatactgtatttgaatctattggaagccaatatggtctgcattgctgtttgacagtaaagaggtagtctttttacaaccggcttgggtttgagtccttataatacctagttttgtttcttactagaacgcaatgttaattaggacattgttgaggaattgaaagtcctgatttgagaaaaaagtcattcctctcttgctttctcagcaggtttttggttggttggttttttgtttattgatcagtttggtaacagaattaaaagatagaggatgcagtttgagatctttttctggtatataatgatttaagaatcttgtgtggaaattatccgtgatccaattgatttagaactaggcattttagccattaatcgttgtgtgtgtgtgtgtgtgtgtgtgtgggtgtgtaaaatcctcaaagtttttcattgctctccaatccttactcaaagtacatctttaactcatatactgcaacagtgctgcaaaagactgattagaaagggaatataagtcatatgattaaaaaacatagagctactaatccaggaaagaaaaacgtaatgcttgttaaagatttacgcttcaggtcagctggtatcatgttcgttcactaagaaatggaaaaccgtatccgtattttaaagaatgttccatgttaccgtttcatctgaaacacactctcttattccctagatttcgccgccagctttctgaaccctgtaactcctttcctcctttgccgacgatgccaagggaaggacgtcctatgtaccaacgccagatgtctgagccaaacatccccttcccaccacaaggctttaagcaggagtaccacgacccagtgtatgaacacaacaccatggttggcagtgcggccagccaaagctttccccctcctctgatgattaaacaggaacccagagattttgcatatgactcaggtaggcctgcgctctgcgcaaattacattcaaggcactttttcacctcccttgtcacattggttagtgttggtatcagactaggtagctcctgaccattttttaataagatctttcagattttgtccgttcattgaaacttcatctacgtgtaaagatttgaactatcaggtcattttgacatgaggtgatggttgaaatagtgtctggaaacaaaaccagtttaaagaaaaatacactttacagaattatgcacagtctcagctcgagagggacattgcaattttttttcttaattctgtacttttttttcttcttattttgctactacagtgctacttaataaaaatgtttacagaaagtaatattcttctgaactaggtcacatattgcttataacatttaagaaaaaattactggggtcccggtgcagtggatcacgcctgtaatcccagcactttgggaggctgagaccgagatcgaggccaccctggctaacacggtgaaaccccatctctactaaaagtacaaaaaattagccaggcatggtggcacgtgcctgtagtcccagctactcgggaggctgaggcaagagaatcgcttgaacccgggaggcagaggttgcagtgagccgagatcgcaccactgcactccagcctgggtgacagagagagactccgtctcaaaaatctcaaaaaaaaaaaaatatatattggtggcaaagattctaagtgttcgtaagtaagaattcttacatattaagaggggaataacagattattcgtagagtttagctttgtctctgtgagctagaaagtagtacaaagcagcgggtcaagtgggggagtggggtttcctgaaaggagggagggtttaaaatcttttccagtctggtggctcacgcctgtaatcccagcactttgggaggccgaggtgggcggattacgaggtcaggagattgagaccatcctggctaacacggtgaaaccctgtctgtactaaaaacacaaaaaattaaccgggcatgctggcacgtgcctgtagtcccagctacttggtaggctgaggcaggaaagttgcttgaacccaggaggtggaggttgcagtgagccaagattgcgccactgcactctagcctgggtgacagagtaagactccgtctcaaaaaaaaaattttttttccaaatagtaccaccaactttgccaatatttgaaccttgagactttaaaagaattacttaaccctgctgagtttttccttctataatctgccaaatcaggacatctgtttttaacacatctcaggtattttgaaagataatctatgaaataaaagctaatgtttataaggttaccatgtacctgtaaaatattgttaacattattgtatctgtggtcaatagatggttgtggatgtggaaatatttgagaacagtttcatttccttttgtctggatataaagtttgggcattctttatgaagggagtattgcgtcctctgctgagtttttctatcatcagtctacttgagtaaagaaaactacctccaggtcttgagttaccagtttgcgtataagattacctggttgataatgaactgcccttaaggctctgcaaaagagagccctgtgacttagaagtctccctctggtcatccttctacactggccaataggttcaaaggacgaagggaattggccccgttgaggcatgcctcaacttctagaaagcatgcaagctccccaaaacctatgaattctctgcccaagtggccttgagtctacttccagggcctgagtaagtgcatcccaggccctgttttctgaaaccagagcacattgctcctatatatagtgctaggttcaagggtggctaaagggcagttgttcgtgaaggcatgaggatggatcttgatgtgtgaaactctcacagtgtggcccaatattgagctcaaggataggaagagagacaaaaagtggggtgtgtcaggatctgaagactgggtactagctctctccataccacatactcttccaggctcattttagagatttcctcagctactaaacttgacatggctgagaggttgttatggtatacagttgcaaagatgagaagacaccttatttatcagtttgcttggccgatttataatttaagaaattttaacagattgtataagagtctttatttgaatttttgccccagggactgtaatttggggagtatcttgaaattcccattgtggtttcagtttagaaccttttgtatcgtccactggtgtctctaattaagaaccctgcaatacagtgggctctattataaatagtacacatttatctctgtaaatttcaaatcctgttaattgatattatccttattccccaaaccacattttaatttgttgtagtttttaaaattcattatgatttcaagaaactttatgtggaaatcatataaattatctcaaataatcattccaaagaacatgtatagcatagcacttaaaatatttctttttgtgctctagaaatgaattttttttgagacggagtctcgctctgtcgcccaggcttgagtgcagtggtgtattctcagctcactgcaacctccgacccccgggtccaagcaattctcctgcctcagcctcccgagtaactgggattacaggcacccaccaccacacccggctgatttttgtagttttagtagagacggggtttcaccatggtggccaggctggtctcaaactcctgacctctggtgatcgggccaccttggcctcccaaagtgctgggattactggtgtgagccaccatgccctgcctagaaatgtttttatatgtataataccaaaaagagccacactgaaactcttctctttttttttgagatggagtctcgctctgttgccaggctggagtgcagtggcacgatctcggctcaccgcaacctccgtctgccaggttcaagcgattctcctccctcagcctccggagtagctgggattacaggcatgcgccaccatgcccggctaattttgtatttttagtagagacaggatttctccatgttggtcaggctggtctcaatctcttgacctcgtgatctgcctgcctcggcctgccaaagtgctgggattacaagcgtgagccaccacgcccagcctgaaactgttttcttgattctgtgattgctccatgtatatcttctcctcatatttatattgtatatacagttatatgtagtgtggtattgagaatgtataacttttcttaagaagatgtgaacctaatggaaaagagattttaaaattctaataagggcgaaatacagcatcttgtgctgtaagaattacattcatacataatatggacttcagagccagtcactatttgaccctcaaaagcacagattgagtcatatataatcttcaaaacatagtccagcatcgtttgtcgaaggtatgtatggcatctcttttgtaagttaagtatgccatgtcttgcagattacttgtaaaattcttacctaaaaagctgttaattttatattgcattctcccttttaaattatatttaaaattaccaaagttgtataccacctttgagttctaatttcaatattgccaataggatacagttgtgttttgcttgaatagttaaatggtaaaattgtatctttctgacaggatttaaaataaatatagtaaccccataaccagggcctatgaaaacttaatctgtgggtgtcaaaatgtattttacttgccatgaaattgctgcagttaagttgacacatatgtatatgtcatacatggcaatcaacaaatatgattcgtagatattttgtttggttgtcattaattttttcatccttgctgaaagtacacttaataacctttgaggaaatctaatgcatttatcactgaatcagtgatttcttttttcacctattggtgttgaacaaatagcacattaggaagcacatagatttatatgtggtttaaaaacaatgtaaaaagcattttgtttatttgtatttgtattttgagatgtagtttcatcctgtcgcccaggctggagtgcagtggtgtgatttcggctcactgcaacctccagctcccaggttcaagcagttctcctgcctcagcctcccgagtagttgggactacaggcgtgtgccaccatgtccagctgatttttctatatttttaattagagacaggggttcatcatgttggctaggctggtctcaaacgcctgacctcaagtgatccgccagcctcagcctcccaaagtgctgggattacaggcatgagccactgcaccctgccgtaaaaagcattttctaagtcagttaactcagcatctatgatccaaaggctattcttacggaagacctttagaactctttattgcttaattctatacaccataaatgttgtgaaaataaaagaagcctcgtaagggaaaaggtagcttatgattgtgctctaataaagcctgacattaattatgacatgggaaatggaaggtctattagttataattataattacaggaatgcaatttcaactgcctaatatttaagataaaaaatgcaaaatagtatgttagtagagtataaatttttattcaggagaaaagaaaaagacttcaatcagaagacagtgaggaaacaagaaatagatatttagggctagcttaatgaaccagtacagtatgatcatgattgtatcatgatactaggttctaaaagatccaatccaatccatctattattgtccctttccttctcttctctagcctattatgctgcataaagcagtacacattttttgttgttgttggttggttgtttttgtctaaatccaacatgatattttttttcatgcccttatggtcaaatgcccacataagaagtgttaaatacacattgagtgcttcatctggagtgcgtcatggagattcccgtagaaagtatcctattttcttagagtcaagactgttttctcattttcatgaccacatatgaggttttgcaaattcagaatgtccagtgacgcaaatattttagatgtttatagcaatatattttattagagctgaaagtgttaggtggttggttgatattttgctttttttgtttcattttattttactttttgatatcttacagtagatttttttagggagtagtgagcacatgaaactaaactttgactttagagaatatcagcacacaatgttcacatggtaatttcactctcaggaatttattctaagaaatagtgaaagatgcatagtgaatgtttgagagagacagaaagcaaaatattaaaaatatataataggtgaacggtaaagtaagttatgggtacttgtaaaagaaatattatgcagccattagaagtcagatttttgaaaaatatttaatgaaatgagactactgagtttttaaaagtatgcaaggcataactcatgcaaattaagagccagtacagaaataccttggctatatataggtggtgatattataggtgatattttgtatctgtgaagtattaatattttatattttaacaatgcttatgtgctgctttcctaatcaaacagaatgagtatttaaaaaaaaaaatcagtcgggccaggcgcggtggctcatgcctgtaatcccagcactttgggagggcgaggtgggcggatcacgaggtcaggagatcaagaccacggtgaaaccccgtctctactaaaaaaaatacaaaaaattagccgggcgcagtggcgggtccctgtagtcccagctactctggaggctgaggcaggagaatggtgtgaaccagggaggtgtagcttgcagtgagctgagatcgcgccaccgcactccagcctgggcagcagagcgagactctgtctcaaaaaaaaaaaaaaaatcaattaatgtatagttgaagaagagaagtgtccaaactcatcacgtcagtcctataagtgaaaacaagtaaatgatgttatagtctcacacgttgtaagcgtaaatgactttctattggtttgtgtctagtactgccttagaggagggagggaaaatgatgccttacttagtgggattcatgttcaccttgcacagtgcttgcaatgctaccattagggttttattcctttgcacattgcagtgtattaaaaatcttaactcagtagttggttggaggagtaatgtacattaataaggtgtttttagccctgaagacctattctgttatcctaataggtttaaacaatgcttctcggccatgtggtggagcaacttaatcagagtagggaatgaagagagggaaagaagaactttcaaaggcaagaggaagatagctaaaataagaaaataaaggacaatgctgcatactttgagcttagagagagcaggaaataaaagcagagggtagaggtgagaactcaacatcatatgtttgccgaagaaacggtttttgcatttttaaattgtgtttcttaaggccactcctgctgctactcatgaggccttttttcaatttggaggcacgtaactctttgacagcaaatgttgttcgtgctattttaaactgggaagttgacacaaataaatgtttcatagaattctaaatcctgttatcatgaaagctcttgaagttcacctacttcaaacttctccacacccaaattttacagataaatatctgaggttcatccaaatgaagtaatttaccatcagttacagatatattgtgaagcagccaaaactaaaattaggattttctaattcttagtttagtgaagagttcatgatttgtctttctacataattgttcagattaaagggaaatactgagtgtttttgtatggttttcgaaggatcttcatgatccagggcatctgcttgaagatacgaggtgtgctttcactaatttgggaggagcacatttcacattaaatagtgcccacattttactctaaatgttaggtgttcaccgcagtgaggtagcaaaatagagcaattcaacgatataaattatgaagatgcattctgctttcttttaaaaaatataccacgagcattcttaagaactgagattatcaaagaagtgatcttttataatagctcttttgaaaaagactgaaaaataatgagaagaaaaagtggctaattaatggcccttccaagctctaagtccttgattgcatgaacatagagtttgagtcttctcattggacctcgctctttctttcttaatgcccttgatggctcagtggcttacacttcaccttcagctgtgcttttcagaccattgtcagctgaatccatttttcacaagtaagcttatgagggactacaggatctcaaatcgatgtaaagaaagctgttgttgaggaatagggtgctttttccattcttcattttattttattttatttttttaattttttttttgagacagagtttcactcttgttgccccggctggagtacaatggcacgatctcagctcaccacaacctccgcctccctgattcaaatgattctcctgcctcagcctcctgagtagctgggatcacaggcgtgcgccaccaccatgcccggctaattttgtatttttagtagagacggagtttctccgtgttggtcatgctggtctcaaacttccgaccttaggtgatccgcccgcctcagcctcccagaatgctgggataacaggtgtgagccactgtggctggcccattcttcatttaaaatccatccattattcaccccaacaacccctcccaggctcctcatatacttccttattaccctattagggctttgataaaagccagtagaaaagcctgtaaatttagagaacggttatctgtccttagcacatcgaaaaattatgtgtaggcagaaaaatgatgaaataaatactgaaaaaatatttaccttatgttaaatacgttaaaactggaatatgtttaactttcatctgtcagagctgacaaatctatctgctattcacataggcccaagctggcactttaatcaagaaatttaaatactcttgggtttctgaaatggcaagagaggaatgtttttatattgtaaatgttattctatgttttgctgtgttggtggatactcatcctaatcaaatagtaggaaaagtagtgaagtaattcctaatgctgcctgtagtagtaagcattgcttgggcttccccttgcagagtttataatatggtttgaaagtgaaacttgtaggattaaataattgggtaatggagcaagaacaacatggttattttctgcatccatataaaaatataaatgtgtagtgttttataggtttggagatgacatgtcagagcctcaatcaactgactaaacttgcacaaaacttaagaaaaaaataacaacattcagagggctaaaatatcccagtcatttatttctaaactattactattgcatttattactactactcatctagcaatatctcagaaattgtgtcatcaggatattttaccttaaaaaacaatttattgctatttacttacaagatgagatacgtgttctagggaaactaacctcatacatattttccaatacacttttctttcatcctttctgaacaattggggcacacataagcaaccaaaaatattatccaggaaacagaaagtatgcagtgattacaaaaaggaaagctgttgaaagacactaattaaagtcagatggaacacagggagtagaaataaaggtaactgatatttattttgaatattcaaggcttaccataaactagcaggcttcattatttccaaaatggaaagcccatgatcaataatttctccctcttgaacattctatgtgtgtgtgtcttgttttgttttggctgatgtgttttaaagagatagggtctcgctgtcttgcccaggtaagttgctaactcttggcctcaagcaattctccctcctcagcctcactgtagttgggattacaggtgcatgccaccactgtctgaacattccaatgtcacttactattcagtgttttcacattgaagacattattttatcttagttattttttaaaaattgtattattgctgggattctaattaggcagctaaggaggaaaggaagtagaatagtatttttctattcatattccctttgaaagtatggaagtgtcaccaagttgttacgaatgtatgccttcttctcttctcagcaaccacaacagtctatctcaaggcccgcctccctcttatatagttatagaaggcctagaattataaaaaccacaatatctaaaactctgaacacctaaacaaattatttcaatatagataatgcatatacttctcaaatcaatctattatgaattttatatccagcccctaataattataaatttataattcatgtattacattgatcagactttaaatatattgaataatggaagttagacaacatattacaattattttaaatatgaaatattacatttgaagatattcattttcagtttgtcatttttatttacatatttttgaaccaccttaaaaagtaattccttagaaaatattgaatatttttaaagccctggaaaaaaagttagcaataaattaataattcggtatacgttcactctttggtgattttcctctgtcccatattttttctgaatggtgggttcatctcccacctgcctatgttaagtattttagttttgagctctaacatactgccataaatttatttattctgtatgactgtattaatcagatattagaaattggaggttgaatatttgtcataatgccataataaataatccttcccaggtttaaaaccaaagactgggcagtttttctgtttatcctcttccttttctgtaggcatggcaaggatctgttgatcagtggtttagagatatacacagggactgtttactgcaacttttttctcacatggcttcaggtcactgaaagaaaaaagtgtttttttccccttcggagtcaaggaacaaagtacaaatggctgataaaacccattccatattcaatactattcaggataggattgactcttcaaaaaatatttccataattgcttatatattgcttcctctccataaaaactctggatatttttaaatattgccatctttagtaatttccagggcagcaatgattatgattccatgaactttggccttttgtgcttgatatgtaacacttccaaaggctaaaccgtggccttattccattacaaaacatcacttgcttatggctacattttctcctgaaacatggcagctcattttttccctcctaactctaaaactattgcttaaagaaattcaagtgtaggatcacttgggaactttaaagaatgagctattgaactttcagaaaatgttaacatcttatctctttctcaatatccaaagataattttcttttacacatccagtgatttgtggactagtagatcacttaatctctgatttttaggtgcttcaattgtgaaaagtgacagtgatgtcttcctaattgattttgttattgcaatagaggtcatagattggcctcacaatttgactttgccttttattgcttagcatgtctcatatgagttttcctcatttcttttggagttaaaattgcaaatctcccaaatcagtactctggcccactatatcagtttttctaagaaatacttaaatatgctctaaatctacagttacagtaagtggcattggctctagtgatttgatttgagagttgagactacagtctggatttactctttatgcattaacacaggccaaatggacagggactgcattttaaggcagtaatggaaggctgaaggctgtcttaaaccaatcataccagttttacccatgactgattgatccctaggggcagagccctgtaagcatttctcttacatgaatggacgctatagagcctggagtttcattcataaaatggagactgaaaggaaacacacacacacacacacacacacacactcactcactctctctggaatgtccatttatacagagctgaagggtgtagtgttccatcagctgctgcttatgccagttgactggaagtaatgattaatgctcattggtcctgcttgcaagtaacctgacactatttatggccttgcagtgttcctaatgtatagtgaatgagaagacaacattctcaaatcagaaacataaacaggaactggtgggtctgaattccattcaaatatgtcatttcagccccacagtgtttgtctaacttggattttacaggcaggaaagggggaagggatggataatctgcttgtgagttgtactagcttggaaaaaggcaattagaagggggtggagtgtgcttttatagggtgggacttttagtttcttttttaataaaacaaccaggatatttaggcccagaactgcttatttcaagtgggtaaagtgaacatacaactgtttttataagtggaactgagatttgaaattaaatgagacagtttaaagatacatgtttggatctctcttctctctctctctctctctctgtgtgtgtgtctttgtgtgtttttgtctgtttcatgaatatgaacaaaagaagggaacatataacattttttaaagtgtttacataactaagtatctgtttttaggtttcgaatatagttttagaatttttacacttaaatgatttctatacttaaatgagttaactaataggtttgaggaaaagagacattttatttcataaaacattttcaactaggatatgaacaacttgaaaaaattttcaaggaatttttatcagattaaatagatggttattgttcttattttgtgtgtgtgtgtgtgtgtgtgtgtgtgtgtgtgtgtatggtttctatttagttgtttctaacaatctggaaaattttacaggagagtaattcaaagataaatatgaaaagtatcaaaaaaaaaaaaccaaaagaacaacaagcatgtgttattgtgattcatttaactattctctttaaaagtatttttcaactctctgttctggtaatttttttttttagtatgtgggtctgtacatttcactgctccatctgtttttcttagtattaaaaaataaaaccactcacttaacatgacactggaaatattatagtaaatcctgggcctgacatccatttacgatttgtgtcatattgagcatgttttgtaaccccttatgcctccagtttcttcatttataaaagggcaaataactctcatcttttagtgtttttgtaacgggtaaatatggttatgtttataaagtcactgataccgtttctagcacataataggggtgcaggcaataataaaggattcccattgacatgattttattttgactagatacttcttcaaagactgctagtcctttattaagatgccattattatttctaataatttaaagtacagtatttggggctagaggataagataaaataagagagacaatactcttaaaacaatcatattgtgctagtccagcaagagaaacagtcttgctgaacttctttttttttttttttattatactttaagttttagggtacatgtgcacattgtgcaggttagttacatatgtatacatgtgccatgctggtgcgctgcacccactaactcgtcatctagcattaggtatatctacccaatgctatccctcccccgtccccccaccccaccacagtccccagagtgtgatattcctcttcctgcgtccatgtgatctcattgttcagttcccacctatgagtgataatatgcggtgtttggttttttgttcttgtttactgagaatgatgatttccaatttcatccatgtccctacaaaggacatgaactcatcattttttatggctgcatagtattccatgatgtatatgtgccacattttcttaatccagtctatcattgttggacatttgggttggttccaagtctttgctattgtgaataatgccgcaataaacatacttgtgcatgtgtctttatagcagcatgatttataggaaacaacaggtgctggagaggatgtggagaaataggaacacttttacactgttggtgggactgtaaactagttcaaccattgtggaagtcagtgtggcaattcctcagggatctagaactagaaataccatttgacccagccatcccattactgggtatatacccaaatgaacttcttactagtattattcatatgcaaagcaaatagaaaaagttatctgaatattgtggtgatccaaggagagatgaaaacaagaggacaaagctgttcatggtatgttttttttcaaatcatgtagtttccagcaagagagaaatttaaaattgaaattccacattaaaaccactatctcttcagaattttgtgtggcccattttggcagctaatggcatcctgtatcatactttctttttctttttcttttttttctgagacagagtctcactcagcctcccaggctggagtgcagtggcatgatctcggctcactgcaagctccgcctcccgggttcacgccattttcctgcctcagcctcccgagtagctgggactactggtgcccgccaccacgcccggctaattttttgtgttttcagtagagacggggtttcaccgtgttagccaggatggtctcgatctcctgacctcatgatccacccaccttggcctcccaaagttctgggattacaggcgtgagccaccgcgcccggcctcatattttcttttaaacctctgttaattgtcagagtatggtagtatgaaataaatactcaaagttggtcaggcgcggtggctcacccctgtaaccccagtactttgggaggccaagacggcagatcacctgaggtcaggagttcaaaaccagcctgacttaagatagtgaaaccctgtctctactaaaagtacaaaattagcagggcatggtggtgcatgcctgtaatcccagctactagggaggctgaggcgggagaatcacttgaacccgggaggcagaggttgcagtgagctgagatcgcaccgttacactccagcctgggcaacaagagcgaaactccgtctcaaaataaataaataaataaataaataaataaataaataaataaatactcaaagttacagttgtgtctatgttttctatcacttcaactttattttaaaatttcagcttagtaagactatcacaggcttgtaaaacttgtaatagtgcgagcctagtagatcatataatctaatgttgtttggatctggtcattatttgtgtggggtattgtccaaaagaaaaccccaggtgcttacaagagaagtttataattgtgtagataaaattctatactgttatttttcgccatgtagccttaaactttcaaaagcacgtaaattcagataactgcgataactgcattatttacttattctacttttactttttctttctttactttacttttacttttttttttttttggacaaggtctggctctgttgcctaggttggagtgcagtagtatgatctgggctcactgcaacctctgcctcctgcgctcaaaccatcctcccatcttagcctcttgagtagctggcactacaggtgtgtgccaccacatccagctaacttttcaagtatttttggtagagatggggtttcaccatattgcccaggctggtcttgaactcctgggctcaatcaatcctcccacctcggcctcccaaagtgccaagattacatgcatgagctactgtgcacagcctactctttttttgagatggagtctcactctgtcacagctggagtgcagtggcgcgatctcggcttactgaaacctccggctcctgggttcaagcgattctcctgcctcagcctcccgagtagctgggatgacaggcacgcgccaccatgcccagctaaattttgtatttttagtagagacaggttttcaccatgttggctagggtggtctcgaacccctgacctcaggcgatccgcccaccttggcctcccaaagtgctaggattacagacgtgagccaccacgtctgacctctacttttctctcttttttttaagattttgcaaatgctattacaagcatattaaaaccatctaaaaattaacatatttctcccccatactcaatcaatagtagattcagtacatccgagctattgtgaagtaagtatctctgcagattttacattatttatattcacagtttacttaaaaccctaaagagaaagatcccatctaagtgtgagtgaggtaatactaaattcatcactcccttgtcaggatttctccagctttgctgccttcttcacatgaggttcagtaactaagatgttacattcatgtgaagttcagtaactaagatgttacattcgcatccagttcagtaactaagatgttacattcacatccagttcagtaactaagatgttacattcacatcaagtttagtaactaagatgttatattcacattgagcttcctaatgaacagcaaataggtcttataaaacttgacttttttgctatcattctcacatgaattcagatatatatgtccttattttggaagataattacttttagacttgttctgcaatagagtggtcatatggtaaaagtaaaaaaaaaaaaattatttccattatcattcattctaggaaactttatgaaataagttttctcaattgagtgcactcaatttgacatgtgacaattggaaaagcaggctaaaagtatggcatatacgtgatggctttgcatttaaacacatctgcataaaactcaggtaatctatgcatccttgtaaacctttggattttaaacataaactatgagcttaccagcaaatgagaagaagtaagcaaacaaaaaatctagtgaagtactaagtttaaaagagataaaatgttggcaagatctgtcactatgctcatctttcttgaatgagattggtgatattaattcttaatacaactcagtattttttacataatagacaaatgtttttgaaaaactagttgaaactcctaggtatgcattgatacacacattttttactgagtatatgataatttcagatatgtgtttacatacacattttggctctggatattttatgcaccaagttttagaaatcatcaatatacaatagacaagtttatgtgcacttgattttgtcatatcaactccacaaggagttagtcaagtgtataatcaatccagctttgcactatatacttataggaaagcaaaaccacattaaaatacaacatcaaacatatttatattttactgagatttctcatttcctctaagagattcaaatgcttaattaagttatacagtcgttattggtagaagaatttaaccaaaagcatcaaatggaaaagacttgtttttctcccttatttagaggttataatatgttataattccagatttacacactatttgatagcagagcaatttcagccagctctgtacagatatttcaggcaactgtggcaaatcttttctctttgccgtggcctgatgtagatccttgaaattttaagcaaactctgccctaaaggagagcctccattctgctatagaggcagcaaatatgcaaatcagagagtgcctagcaattttaaatgtgcaaattcaatactgcactttgtggtcaaacctttggtaaagcttcccaaatcaatattatgtttcccagcatagcttgaaaatgcaaatcaagagacagagaagaaggtaactttttttttttttttttttagtttcttgtctgcgtattttaatttgaagagaactttactgatgttactaaacgtgaaaactaatcaaattagatagtttggggtgttagtttattattcttcttaacttccgctacattgattagtgcattaaaatgacaacagggctttgttgctttgaatttttacagcatattagatcagctttcatcaccatgaactcatctgtaacaaattataggcagtttaatttctgtaagctgatttggccagtactaatatgtcatagagcattttgatccacaagttttgaaacaaataaaattctttgtcctaaattaaatttacataatttaatttttagatttaatttaaaacttttaaaaccagagcgctttaggagctaacatgagggggtaatactgtaaaaagaagctcaaaagaggtacccccggccgggcgcggtgactcatgcctgtaatcccagcactttgggaggccgaggcgggtggattacttgaggtcaggagttcgagaccagcctggtcaacatggtgaaaccccgtctctactaaaaatacaaaaaattagccaggcatgctggcgggagcctgtagtcccagctactcaggaggctgaggcaggagaatggcctgagccgggaggcggagcttgcagtgagctgagatcacggcactgcactccagcctgggcgacagagcgagactctgtctcaaaaaaaaaaaaaaaaaaaaaaaagaggtacccccaaatagttaaagcatctactggagagtctggcttaaaccttataagtttataatgaattttattgtattttagatatcatagattaatagatagatttgtgaaaaatattccaaaatagatacactaataatcaacaaatcagtcatctcatataatttaagaacagcagagtaagataacaaatgtaacttatttagatatataattatttttagttttaagtactgtggttaaagtactcagtttaaatacttgtgaggatcacttaaaaatagtgttattaataataagtcccatatggtgaattcttacagtgtgcagatactgtgcgaaatgttgcacataacttactccacgtggtcctcccaacaacccttttaaggatgtcattattattattattcccactttacagatgaggaagttgggagttagagatgttaaataacaacaaaatgtcatactcccatgcaatgtcagaactgagattcaaaatcagttctatcagatgacaaggtgcctgtttataaccattgtgctgtacttgtactaatgatccttaaactataatctgtggatgcataataggacagtgtgaatatgctgtcatcttaatatttttgcatgagttaaactacagcttgttacggttgttgaactttgtacattttattcgtgaagaaacagaactgaatgcatatgcaatgcctccttcctctgccacaaaacatttgcctttgaagtcgccgcttagctagtttggatcatagtcaagcatttaacaaaagttaaaatgtaatgccaaacttcattggttggattttttattagataaggtagaaatgaaagcagcaggcaatttaattagcagtaatttttctgggcaagtcattactttgatgaacttcagagcaatgtttatggctcctaattaaccatgttagtcatttgattgaataatcactttggaaatgtttctacaatttgattagagtctgacccactctgatagtcataaattaactgatatcacttaaggataacatgactttacttactttatggggataatctccccttagccatattttttcaggcttctctggactgtataaaggacaccaattttaagtatagaccagatttaaacaatgctagccaagtgtatccattttaagagctagatgttaattttatttacactagagtataaatagtaacagcaattggcaaaaacacagtcgtattccatatatttctaaattgccatccattgcttttttgagttcacaagttgggcctttggaagtgtaatggagattctggcattaaccttattatatgttattaatttattatgaattttaaatcagtatatcttaaatatcatagattagaatttattaagaatgttataaagtaaatatagcaataaacaaatcagccatttgaatagagatggtattagtgaaattatccatcagatctcaaatttgatgtcaaatatctagttttccagggttatgctaattttgtcatatgttaaaacacttttataaggtgttctttgacattaaatagtgaatttctcagaaatgtttgcacttcctttctccctccttttctcccactctgggaaggaaagactgcatttagtcacacttatatgtaatagagtttagcctatctgttttcctctggctgcctccagagtcagccagctgtttttatagccgcaatccaggtgtgcagcagtcaataaaagtattttgtggcagggtgtcaacattagttcaacaaaatgcttgcctcaaagcagctgctgagctgatggcagagttattaacactgtcccttccagtcccagctgctttaagggaccttacgtctgggaataaatcaaaatagcattaaaaattaatttgaagtaccattggttaagaagttgggctaaaatggattgctaactatttggtaacccaaaagattaactatactgcaaccctattataaatgcagatatcaggaaacagtgttaactctgtcttttatatggtcagaattatatgcttcataatacttcatatgaagaaggcatagtataatagcataataaaacttttgataatacattttacagtattttcaacttgaaagcttctaaatatttccaatgttgctatattcatagaatgctatgggattatacaaatttatttgctaaatgtcctgatgcatatttaaaacttgtgaccctgtttcaaggacaccatctcattcatgtgggttgctgtttgagctgacttttagcaaggtttatttgggtaaaactttgaattcaccttcctattcaagagaatcagcattcaccaagatatatactcttcattctttcatttcatgtgtgggccctgcctgaaatgttgattatatgttgacatgttccccacattggaacctgtgtccgtttctgtatcttctctgtctgcaccctgtccattgataaccgcagcgtttcagctccagactctttttgaccaatattgtttcctctttcagaagtgcctagctgccactccatttatatgaggcaagaaggcttcctggctcatcccagcagaacagaagttaagttgtccaccactgaaattccgtgtaaataccgttcagaataatcagacatcccaaatatgacgtcatttaattaatcattatattatttgggaaaaatcatttatgttccctaagcaattgttttaagactatctccaaagtaaaaagaagatgtttcaagtagtggtatcttgttgttaacatgagtcatatgcgtagaaacaactgaaaagtggatttctgtgttcttttttgccaacaaccacatccttttaaaatagaacatatgctttatagattagcccactttactactactgaaatgtatctttgaggaatatttggttttgcttttacagacctagtcatagttttggagtaaaatgccatcgatttaaaggttttcacctttaaatgttctggattttatatttttggacaaataatttatatgaatgagatttcacataggaggcctagagaaagagttttctcatagacaggcttgtggtaaccgtggtaggaaagctttgcctgtaaaggactttgatacctaaaaagtaatggtaaaaatgatttcgtctggatataatcctcaataaaggatttctgaaatatgtgcatggttcctaacctaaacactctacatctctttaataggattgacttggatgcattcttttaggctaggtctaatattggttattttgtgtaaatgatattagtagaattttaaagggtagtatgagatggtaaatgtaaaatatttgaaattaaaagttttgcacaaatgcaatgtaattattgttgcttctgttgttagtattatatacccaccataaagaccaatacatttgagaaataaaagtaaactctatgaaatttattcctggtaatcacagatagcaacaacgaaagttcacagtgaaggatatttgagagaggacattattatgaaaagctgttgatttattttgcatttttttctgtggacttaccttacagcaaaaaaaaaaaaaaaaaaagggaaactttttttttcctcttatcttgctaattgagtacaggaaggttaacccatctaaatatttttacaagaaagtaagaggataaaataaatctgtctcagagcatcagactaataatataatgtgaataccagtaattcaccttgctttctcactttttcattgaacaataaaatttagatgaatctaaaaaaggagacgatacgttataaatccttgccaatgtttaggtgagctctggcttgagttaacaatgtaaataactaacttttatatttcactgtgtactaggcatcactctaaactacagcaaccctataacatgataagtggtgttactgtcatcccatttaatagatgaggaaactgaggcacagaggttaaataatgtgtccagggctcaaggaactgaaaggtggtggcagagtcattttctatcacaatttttatgttaaatggttatattttaagtgtttgtgagcttcatttctatcatgaataaatgtattcctttttcatccacaggctgtatgtttgaaaagggccccaggcagttttatgatgacacctgtgttgtcccagaaaaattcgatggtaggttttacactttgcctcaagttctgatttttttaaagatggagtgattaccttcgcttcttctgaaaacagtggacatccctacttaaagattcctatgcacataattcatcatgcacttaattttagccaacgttgacctattacaatttatctcttccttgccccagtaggaaaccttttcttttgtgttaggagggagttcatttttggagaaatagacaaagagcatcattcttgctgagctttgtgtagcgtaagagggggctttccattgccctgctgagcacatgcagcttgttattcgagatttattgaaagctgatcctgtaattaacaaagcagagcagaaaacgtgctgctgtggatggaccgatgactaacgcggcctctcttctttcattgttcatggaaagatgcattatggaacacaggaacaacataactgcccatttagttagtgattgttagtccctttttttttttttttttaactggggaagatgtatgttactaatgtagcatgactttgtaattgcttaaaagggagttaggaaagcattacctttttaatatcacttgctattgcaatgcagaggtctcagatgttagaaaagggtgtcaagttaaattgaattttttttttgacaaaggtgacaaaagttggcatcttgaggaagcttgggtaaaaagtaaacagttaattgatttagtggttcttcagagtggttttcatatttcctgctttgatcgtttgacaggaaaccagcaggggccctgtgattcactgattgcacaaactttgggggtcatggctataatgacttgggtgctctctgaagttttaaattgtcattatttaaacagcaatgtacatgctcagattgcttttcaatttctaattagttgcttggagactaccccatgttcccgagctttgtgctacccttacccttctcagaagggctggtaagtctagggaagatctgcttctttatcctcctttagatttctaaattcattcaaggtcaaaaaaaaaattataggaatcacatttttggttttattctacaacagatgttagctttaagctttgcatttcagaggggtgagccgtactatttagcaacattagcagagcatcagcattcttaaaatatagcattttctcttagacaaagtatataaagcctcttactcttggaatgaccttcattagtttctttcgtgtttggtgagcttcatatttgcagagatcttgaaaattagtaagggcatataagaaagaaaaatatctcaaaattatggacagaattacaatataatctgacaggccaaagtcacactaatatttagggaacaagctgccttgattatttattcccttcgacttttaaatactcttcaattttacactaataaaacattttttggaagatagtatttgccttgtattttataagtaatgtagaacaagaagaaagaaaaatgagggggttattttttcactgtacatggtcagtgtgatcagtcacatttataggcagaagcaatatagagactataaaatgtaacagtgtttcactctatctgcataattactcagttactcccataaaaaaaacattgtaaatctcagaaggaaaaactgagataaataaaactgtcattgaaatcgatatgaagatacacttctatattatcatgttaagaccaaaacaacataatgattttagcagctattgactcacacattttatattttggtttaggtttttcaaatgttgccctttctgtaattattttaagaggtatatgtctctctactgaccataggtaagttttagaaagtgtgcaatttggtctattttataatgcacacttagtatgactacataggcttagatatattttgtctggattgtttctttagcggagaagagcaatttatgcactaacaatgacatacttgcagggccctagacactcaatccccaatgtgagcagttccacctatttttgagacatgtggctggagatggaagtaaataatcagaagtcatgaaactttgtatttttttttgtaaaattaatataactgaccagatttataccagaagcattgcaacatgaacacctttattgctgtgctctatttaacagatttttacactagatatgaatatcaaataaatataacacaaactttttgtgcttaaaaatacatacttacagaaatctctcgtgcatgcatttttaaattggacttttagaaaaaacaatagcaagttaaattcaagtgagtgaagtacaagcaagagataaagaaaaatgagagagaatttttgttaccagttgaaaaagtagtagctttaataggaaggtatatgatgcggtgaaggaagggtagtactacgataatgcagtatgccctgaattacccacaagattttccttatttatataaagtgaagattacttaactcagtttaggatactattaaatttgctttgaaatatttgcattaaaattttcaatagtttttcatgagcaggtcaataagatatttataaattatagtttgcagaatttaatttgtatgaatcaaatgcccagagcttaagattgattattccctcttcagtgttgcctagagcagtgggtaatagcattaacaataaaagcaaagaagtctgattagatacgatggtttttaaagaaatcaatttaaaaaaaaagatagttccacaatatttttgtaagtaaatgatgtgtgtcattcatattgacacaggatttattctgcacctgtgttatatatagttatctgtaagttcgtacagcttgctcatttatattcaaccatttaactattttaaattcctctttaatggtaataatatatttcataaatgcccataaagtggttgattgtggtttaaccatattagtgattgatttaatgtacattttatgtaagatagcatagtattgctaataatagaaacttaaaaatgttttaatttaggagacatcaaacaagagccaggaatgtatcgggaaggacccacataccaacggcgaggatcacttcagctctggcagtttttggtagctcttctggatgacccttcaaattctcattttattgcctggactggtcgaggcatggaatttaaactgattgagcctgaagaggttagtttaatagattttaattaggacactcagacatgttataacataaagaaactgacacatttgattaatataccaaaaatgtattcttaatcatttcaagactttagggaaactttctgaattaaaaagcatgcaaagataaaacatgtctacctttaaaatcaccaatgtattgcgtgttccttccggttgtatacaatcctacaaaattgatgttggagaaaattaaccagagcatgctttgcacctttatttaagaatgtctggcttcagggtttctaaaggagcatctgaattagagaaaagaggcaggagggaggttttatggtccttaggagagaggaacgatgtctgcaaaagtcaactggttgggggatgggtgaattattctttcaaattagcaatcattatttggacaacttggattttgtcatgagggttggagaggagcatttagaggccaaagttatgttcaaaagaagattggggaaaaacagctgtggcggataaagggatgcaagggcaacagtggaaaattctcagcccttaagtgtctcttacaagacacaggcctggtagaaacattttcctttgtccgtgacacttgttccaagtcagctggactggcatactccattggaaggttgggatgaagtttaaaatgttgccatagcacataaaaaattactaaaataagaagagcctggacagagataatactgtacagagaaatggaggacaccttcaactaacttcaattgtcccctccttcccactccccacatacaaatggagtatttccatgaagaatttctcagttcagtttttattcttcccagaactagctttaggcttaaggctactattgttcctgtagcataactcatcaatagcattttggactgctgatggaaaggtgaagttaatatcaaattgttgtgtcttcattactaaagatactttctctgctactattaaaattgactttagtttatatcagccaaaaaagcaatggaagatttttagctaccatacctctaactgattatattaggtattgaatctaaacacctcagtaatattgaaaaattcagtaagtttaaaaaatgtttgaacccaaagtgattttcatatacactgaacatccacacccttgactactgggtccatcatcttgaattttctgtctttattaaaccacgtattcaactataatcagataatatgccctaatttgatgcccagaagataagtttacataacttcttgaaatttaagagattatctgactcgagaatgtactgaaagtatgaaataaaaggcactggttagaacagtcaagtctccttcagtttatatcaatactttagtaacactagagggttagttttgcagtatctcccttgccccacatcaagcacgcacacacagaagactcaatgtcagtatttgaaaattctcattatctaggatgacgtttgggtgtttgaatgctgtagtgtgtttaaaattaacttagctgtcaaagaagattagttttttcatagatactctcacatgatgtaagtgaaagaaccacaaaaatgttaagcactaacaaattgagactagaagcatttaacaaagtaatttgaaagccctttcgcatgatgggagtgtgtgctcttcacctcatggaagatgttaataatcactgcaagagttggttcatgctggaactgagcactttctacagggatttgtatcagttaaacagttatttcccttcacctgtgattaaaatgaactgagcagaggtttttgttgttgttcctgccatatatttgttaagatagggaacattactgaattatgccagtatttcttgatccactcagaagaagaaaaattcttttgcaaatgattaagctttttatatagcaactgttgacttttatgatgttcagatttgagtaagtaggagatttgactagatgaccattaagtttcatcaaattctgagttactgtgatttttaaatggagggaagaagtagaattacatctgttccatacaacagactgacatttagacaactcttctgtagcagcctcataaagttaaaaagaggctggataattcagagtcagtagagcgtttccaaataataaccaactcaatgggaattgtgcaataagcactgaatgtctcctaaggcttttgttcaaaatgaaacatcccatatctgattgctgcattgctgactgttgcaattacttccatcaggcaatgactgtagggtcttgtttaaatttcttctttggaaagggtttgtgaaatttcttgtctttgtgacctgtggtcaccctgttccctctactgcctagcagctcattgggtgcctgtgtcagcacagtccgtgaaagatgtctctgaagccatcttattggaattactgatgggttccatttctttatatttcatcttgcattttaaaatgatattgagtgagactccagacctgcacagattatctgctcagtgtgtttagggtaactttagaaaacgcataatctttaacatgtctttttcttagatatttgagataatgaaatactatttttgaattagtcatgtctcctagggaattgttccaggaaacaatttttttttttttttttttttgagatggaatctcactctgtcacccaggctggagtgcagtggtgcgaccttggctcactgcaatctctgcctcccgggttcaagtgattctcctgcctcagcctccccagtagctgggacttcaggtgtgcacccccacacccagctaatttttgtatttttagtagggacggggtttcactatgttggccagggtggtcttgaactcctgacctcaggtgatctgcccacctcagcctcccagagtgctaggattacaggtgtgagccactgtgcccggccgggaaacaattattaacatagaaagtcgtctgtaagactcagtataaaagtcttttgatgaaattgaagcttgttgagctggaagagttaccaggaagtctgatagccaggccctgattgttgttatcaggttcagtgttacatattcaagcgtgatattttaaaataagttgattaatgcttgaactattacattatcttatttaatttatttgacaataagggtgaatgccatagtgctatcatctttttactctcttcactaacaactcaagttttcatttgaaggcgtatataaggaagtcactggaagttttcccaccatttttcccactccatattggaaactatgccttgactttgagtggtgttggatatggtggcgattggtcggtcgtatgtgaaggctgaatgaactttcttagttggtggttggcctacctggcctggaattatttacgctgttaatttataacttttgtcttgtctgcatctcttaagcatattgctctctcccatttacctcaactttatgaggaatatgacactaaaacaactctaagactacattttattgtttttaaatgtccactaatacccatgatgctgagaatgaactggcatgataagtatcaaactctgtggtatttttaaaaatcatatttctctctccagagacctccacaacattgtattaaagttgttgtgagtatgtgagtattttattttctaggtgcatcctggtgagtttctagaaaataatcctttataaatgaataaggattcagaaattattgtttaaggagatactaatactttattttcacatcccctccaggtttgcatatagttcggctgctatgcctattaaaggttcactgatgtccatagttaggtttttgaatgaaatattctttagaaaatgctttcatttcttattgcctccccccagcgcccccacccccgcttcaattcactattgctcagaagatttacattaaaatgaagtttatctttgggaaattgagatgttcctgccactgtgattgtctgctgggatatatgatgttgtccctgttacatcgcatctctctactcttaaaaaacatactgatgcatgtcattaaagtactttatttcttcattcagagaataaaaattactgagagggaaaatagctaggatcggtatttctaaaggaaaaaaaaaacctggagaaaggttattactaataaagcaaagagagacagaatgatctctttgaaaagcaatctattttagtatatatgacatagcaacaacttggaattttatggaaatgaaggcgctccctagccctattagataatgtcctcttggggttgcctaggtttgcgtggcagctgcagtttcttctcagactaataaaaagtggaaattaatgagagagtgactttagctggggtaggaaaagcaagctacactattctgtatactgctttggctagcctggggtggtgatgaggtagggatatatatacattgaggagagaggattttttttaaagctctattgaaaaactcttagatacattgctcctccaaagccacataataaaaagctctgagtttttttattaaacaacagagtagacattctgctttagagatttttgtttgtggactcatatacatggtgaccttttccacttccttcttatttttagcatccaattaccgttctctaaatgaatgcttaattcttcagtttggtattacccacagttttattcggctgctgctttaggcaataaaaagtatttgcagttcggtttattaatttgtgtactgtttcctctgctacacacattgtcacttgttcactctttcatatagtattgagcagggtatcttttttcctttggcttatcataacctcagtaaaacacctttacaaggagatcactaagctgctctttatctatagtttttgtctgaaaaaccaagaaggataaaacagacagtatatctcagaatgaaaaacgtgcctcattttggtgaactgtagcctgttcattcctgttgtaagaacatttccttatttccatttaattttgtattcaaaacaatagtgacaaataattctattgtggtgttttagaaggatcactgcacgcctggtttaaaatgcaaaccaggccaggcgcagtggcttactcctgtaatcccaacacttttggaggccaaggtgggtggaccacctgaggtcaggagttcgagaccagcctggccaacatggtgaaaccccacctctactaaaaatacaaaaattagccgggcgtggtggggcccacctgtaatcccacctactcagaaggctgaggcaggagaattgcttgaacacaggaggcggaggttgcagtgagccaagttcgcgccactgcactcccagcctgggtgacagagcaagactctgtttcaaaaaaaaaaaaaaaagcaaaccaggagacaggaaatccagattacgatagctcttgctactttacttatatccttgagttggacatttttgtgggtttggaagtaattaattaaataatttttatgaaatatgctgataagttaatacttaacactacaatgtaattctgtttcgcggcaggtggcccgacgttggggcattcagaaaaacaggccagctatgaactatgataaacttagccgttcactccgctattactatgagaaaggaattatgcaaaaggtgagcagctaatacagcattaaaattcattgaaatgttgcacattaatctgaacatcatactttaaacgccacatatcattgcattgctgaagcgagtttttcactcattttaacaaatgcttagctcttggttttggtattacaagcctttctatgtataaatgcctagacattgtagacaaatgtgtagtgatattgtatacagaataataggctttctggaaggtcctactttgctgcacatggttaaaaaagattgttttagtattaatagcacatctgtcttcagaagtttttattgcacattgtctacaattatataattttggaatgcttttgtttatagcaataaagaatctttagaataaatttgtacttttttcttgttttgattcttaaaacagacatttctttttctcatttgtgaaaacattttcttccttgcctcaaatcttgcctagttttatcatctgatagtttgacatcctaaaccattcattaaaaatgaacatttgatcttatttggtttgtggaagttcaatatattttatttcaaatgagcttcccataatatttgaaagtagctttttgtttgtttgtttgttttgagacagattctagctctgtcgcctagggtagagtgcagtggcgtgatcttggttcactgcaacctcagtcccccaggttcaagcagttctcctgcctcagcctcctaagttgctgggactacaggtgcgcaccaccacacccagctaatttttgtgttcttagaagagatggcgtttcgccatattggccaggctggtcttgaactcctgacctcaggtgatctgcctgccttggcctccaaggggctaggattacaagcatgagccaatgcacccagccaagagtagctttttaaaaaagagtagagaaaaaacaagtgaattacacttaaaataaaatacaacatttttgaagaaaggaataaataaatgaatgaagataaaacgtggatatttgtttttattacaccctttagctttgcaagtgtacagaaatctaattgctttgactgtgaaccaagtttatgatttacctattgtgaacgttacagttttattttgtatcatttgtttattttagggtttgtaaacatagttacatgttatagattgtggcacatttttatgtcaccatagttttacccagaaaaactagaccagttgctacatgaagcttattagagcagcgaaaaatagcactgttgactttcctagaacattgtctattgacaagaggcatattatctcagtgccctagaatttgctggctcagacgttagaacttccatgatccttaaaagaaaaggctgacttcgattttcagttgcttcctgttttctcaatcatgccttcaaaatgtataacagtttactacctgctcctcctgtctttttcatctcaaccctggggtcatttctaattcctccctttctctcacctacctttttgtagtaagatccttcaaatacattccattcctttcttttcaccaccatcttcctaatgcgggggcacattgcctgggctgtcacagatggtgctcagcagtgtccccgggcagtattgcacagcagtaacagataaggcagtcaggaattaggtttgaatgctagcctctcaccagattacattcttgaacagattattttcctagtaaatggtgatattcttgcctcattaaagttgctgtgattattaaatgaaataatgtacttgagatactttacattgtaactggcacaatgtaaagtatatctgaactcctgggctccagcaatcctcctgcctcagcctcctgagtagctggaactacaggtttgcatcactgcacccagctaatcacattctcggatatgtaccattctgatgttcaagtaaattctagtatagtcattcagaggaaaactatgctgtccttttttaaatagcaaaaactatgatgttgaattatatattttaacatgtaggagaaaatatttatatggctatatttgttcactaacttaaaactttgtgggcatatgtggtgtatataatatagaaaattagaagattagagaaaaataaaaataacttacatctgaacatgttaaaaaaattgaaaactggtaattaattttagtaatacggaagaagtaagaaacaatggaacagtgtatgtttaccttacagacaatgcctatgtgtacttctatttcaaaattaggaaatgcctagaacaatatataccaatatgttaatggtgattatattctggatgatataattatagaccctttgttttaacttaattgataatttctaatttatccttcagtatccccatattacttctgaaattttaagagataaaacataatttgaatatccagccattgaaagcacagctctaaagctatctccttgtttacttttgatttatctccctggaaaaattcctgttttttctgtctgtctcagtgttgcattttggctatacttaatgtacagcattttgcacgttagtacttctgttactcataatggaagacatcattccccttggttggttatcatcccttgttctaaactcagtagcatttaacatagtccagcaaatgaagtagtagccctaaaaatgtttattcaaaagcaatacagaaggaagcagtgaggaaaggcagagtccttgagagattgcataagcttgattgcatgttacacattttaattcatttattacataatttttaagtatagccagtagcaacccgtcaaaggaagtccagtacttaaagcaaatgtatcttcctccacagccccaaacaaaacaaagcacattataaaacactcagaggtatgcaggccatttattttattttattttttctccaaatactttgaacaaagaaaaaaataaaggaaaactaggatttactatctcagctttgttcctgatagtgctatttttatgtttatggtcatttcatcatttcacctttaagatcttaattttctttgtatgaaggactaaagtaaataaatgtatgccagactcctctgtttctggcacagtgctctgtgctggagacttccatcccaaccttgcaatgggctttctgaggcgccattcctgtctccatttcacagcaaaggccactgagaggtagtctaagaaacaggtccaaattcataaaaactactaaatgttcattctttcaaacctaggtacattcagattatttgaattctctaaagtggttcctcttacttaaattcagggcaaaagaaacaaaaaatgttctaaatttgaattcagagcagcagcattcattgacaattgttacttttccctcaaagatataacaatactttataacccaggaacacactgttgccccacatcaaaaatcaactagcaaatgccttgttgatatacaggaacatggaggtgttgtgtcaccttcagctttctaaaatctcatacctttacacacacccatacaaagtgactatcaaagttaatagaaagaactgtattcatccacccatccccccaccccgggttttgagagcatctcagcattgtctattaacaagaggcgtattcatctcactcagttgtttataattttctagggaagcattactcttcagaatttaagtttggggtatgtcataccctataaattatgctacttctttattccaggcagttgtcacatttctttttctcatttcctccctgtgcattgtgtattttaaattcctttcacttttttacacctcttacttcaatttgacactttacacacatccttaactctgtctaatgcatcttgccttcatttttaaaagtgatgtacccaggatactgtccttttgatccatctttcatttaaatgaggctgtgtatcctttctttctttctttctttctttctttctttctttctttctttctttcctttctttctttctcccttctttctttctctctcctttctttctttctctctctcttttctttctttctttatttctttcctttctttcttctttcaacacacactgccaaaaaagaaaaaaagtaaagaatccatttattctgtgaatcagtgaattactagtctagtcttattgggaataaagcacatttttcttttaaattttgaatttagtttttctaccatttcagatatgtaatattaagagggacagtgtaccttaaaagtacagatttgtagatactaccttttaaaatgcagaaaaaaagctttcaatatgaaatgcctgcattaaataattgactttttttcaaaacaacgatgtaagtttacctctatattaagacaagcaaattcctgtgcttcctagctatatctggaattaattaattattattcaaggtcaacattttgcatctcccttgactgaactgtagtttattccacaaagtaaagacttttttttttttatgtgtatctgctattagttgtttgcttttttgggccagagttacccatcctttcctgtatattaaaccacgtttttggctttttccttcctgtccttccccatctggcgatggtgaggatgggtttttctcttccatgttatcatcaggtggctggagagagatatgtctacaagtttgtgtgtgatccagaagcccttttctccatggcctttccagataatcagcgtccactgctgaagacagacatggaacgtcacatcaacgaggaggacacagtgcctctttctcactttgatgagagcatggcctacatgccggaagggggctgctgcaacccccacccctacaacgaaggctacgtgtattaacacaagtgacagtcaagcagggcgtttttgcgcttttccttttttctgcaagatacagagaattgctgaatctttgttttatttctgttgtttgtattttatttttaaataataatacacaaaaaggggcttttcctgttgcattattctatggtctgccatggactgtgcactttatttgagggtgggtgggagtaatctaaacatttattctgtgtaacaggaagctaatgggtgaatgggcagagggatttggggattactttttacttaggcttgggatggggtcctacaagttttgagtatgatgaaactatatcatgtctgtttgatttcataacaacataagataatgtttattttatcggggtatctatggtacagttaatttcacgttgtgtaaatatccacttggagactatttgccttgggcattttcccctgtcatttatgagtctctgcaggtgtacaaaaaaaccccaatctactgtaaatggcagtttaattgttagaaatgactgtttttgcaccacttgtaaaaaggtatttagcgattgcatttgctgtttgttgttttattttgctttatatatgacttgcagaggataaccataaaatgggtaattctctctgaagttgaataatcaccatgactgtaaatgaggggcacaattttggactctggcgccaaactgagtcataggccagtagcattacgtgtatctggtgccaccttgctgtttagatacaaatcataccgtcttttaaatattttgaagcccatttcagttaaataatgacatgtcatggtcctttggaatcttcatttaaatgttaaatctggaatcaaaatgaagcaaaaaatatctgtctccttttcactttcttcagtacataaatacattatttaatcaataagaattaactgtactaaatcatgtattatgctgttctagttacagcaaacactctttaagaaaaatatccaatacactaaataggtactatagtaatttttagacatggtacccattgatatgcatttaaaccttttactgctgtgttatgttgataacatatataaatattagataatgctaatgcttctgctgctgtcttttctgtaatattctctttcatgctgaatttactatgaccatttataagcagtgcagttaactacagatagcatttcaggacaaaatagatgactcaaaccatttattgcttaaaaaatagcttacgccatgctatgctataagcagcttttatgcacattgacaaatgaagagtaagcttcagcttgctaaaggaaactgtggaaccttttgtaacttttggtgatatggaaaattatttacaaaccgtcaaagaatatgaggaagttgctgtatgacatagtgctggcactgatattatccatcatctctttttggacacttctgtaaatgtgattggattgtttgaaagaagatttaaagtttcaaagttttttgttctgtttttgctttgcatttggagaaaatattgaaagcagggtatgttgtttcattcaccttgaaaaaaccatgagtaaatggggatatagaatctctgaatagctcgctaaaagattcaagcaagggacatgaattttgttccatctatcaataatatccagaagaacaacttttttaaagagtctatagcaaaaagcaaaaaaaaaaaaaaattctaaacacaaagtcaaaataaacctattgtaaaagcatttcgtgatgagcatgaaaaagattgtttaaagatgatccccccagctacccattttccaaaactacacagatcacagctcatttctctaagtggagcagttatcaagaaacccaaacaccaaaattgctactcttcacatttaatcctacaaaaagtactccaatttcaaaatatgtatgtaacctgcgatttcaatgattgttgttcatatacatcatgtattattttggcccattttgggcctaaaaaagaaaactatgccttaaaaatcagaaccttttctccccactatgcttatgtggccatctacagcacttagaataaaaacagatgttaaaatattcagtgaaagttttattggaaaaaggaattgagatatataattgagatttggtgaaattgaaggagaaaatttaagtgagtctttaaaatatattctgaatgaaaactgtattgaggattcatttttgttccttttttttctttttctcttttctcctttttcttctttttaatagtctagttttagtcagtcagtgaggaagaattgggccatgctaacgttatcacaagagaacaatggcagaaatggtattagttatataatatttaaggacaaactatatgttttgctgttttaacgtagtgactcactgaactaaatacataattgaccaacattaagtgtatttccaatacagaagggttgaaaatattacattataaactcttttgaaaaatgtatctaaaattttttaagttctgttttgattccactttttggttgagtttttatgtttttgttttcaggtagattaataaatctggcagctgatttctgcaagattcttgtgttttgaatttctcattgaattggctactcaaacatagaaatcatttgttaatgatgtaatgtcttctctcagcttttatcttcactgctgtttgctgtctcttgatgatgacatgttaatacccaatagattaattgcaacaaacacttatactcaaataactaagtaaaaataatttttcttgttatgtccatgaaaagtgcttcagaataaaaatccacaagactgacagtgcagaacatttttctcaaatcatgggcggatcttggaggtctagtttcccgtagatgctgtaaccaattaccacaacttcagtaatttacacaaatttatcttatagttctggaggcagaagttcaaaagaagccttaagagactaaaaccaagatgtccttaggtctggttccttctggaggctccaggggagattcttccagctttcacttctagagtctgctgacattccttggctcctggctacatcacttcaatctctgcttccatggtcacatactcttctactatagtcaaatttccttcctgcctcttataaggatgcttgtgattacatttaggggatgctcagataatccaggacaatctctccatctcaagatccttaacttaatgacgtgtgccaagtccctttggctagataattattcataggtcccagggattaggacatggatgtaaggggtgagggcagggctgttattcagaacaccgcacggaggaggaagactgtgtagcaaagactctaattgatttactcaggaacagtggagttctgctgagggatctaggatttgaaagtactagagtttgcttttatttaccactgagatattttccccttattctgcataaataattttgaaaactttctatattaaatttcaactattccactaaaatgtctggtaatcacatcaagcctttagattattcaaatccttccccagcccccaggaaaacactaagtcatgaaacagaaaaacagaaggtatgataataatagtaataacagttaaatcagtggtctaatccagattttattttttaatacatttcttttggtgttaatatgggttactatgtgatcttatcatttgctagtgattattacttattaggtaagaacaatgtgtaaaatatgtctattactcaaaagaacaattgcaaaatgagtcaacttatctttatataaccaggaaagaaatatattgccagaagctacagaattttgccagatgatagggatttctaaaatgagccactttgtctatcatgcagccttttcagagcttgtaatgagaaaacattacagaggagaaggtcatttggatgtttgttacttggaatcctagaaaacaaaaactaaaatttaaaaataagaagtgagtaagctattttccatttgcgatttggtatggagaagagaggaaatagaattattaaaaaaatacaaattgggtaaaagtgatggtggaaaaaatataaagaaggcaaatgtacatattaagcaattctactaagaattggaaaaatcaagtttcaaaaagatggtaatagttgggcatgatactagaaaatttcacccagtttattcagagctcaactagtacttttaggacttctttttttatatacatgagactcactttgacatacttaaaaaaaaaacagtttatggaaagtacagtttaagaggagaatttgattagactaagtggatatctttatagaaatattaatgatttcagaattttcagttacaagtgtatataccgtggctattgtttatggattcatatgtaaggtagggtcttttttgcatatagactccagtattagttactttcattctaaaattatatttatgcttctatggggaagaaaatttttaattcacttggttgtattaaaattatacttacggtttgagaaaacatgctatgaaaatcatgattatagcaaattaaatatgctcaaaatttaaatctaaaataaaagcccagaaactgaaaatattggactgtcgtgatcactctgaaaggtagcacatctaaaactgataaacgtcatctaaatttttgactgtcttctaatcatcgtgtcatttttaatagtttatgaccacagcactcaagtaatgtgtttgcactactttgccatatattattcttttagataatttagataccaggacacctgataaatcctttttgagttctacgttctaatctctgtaaatatcttgtttcacataaatccttcaataaatgtatcatggagaaatttggggaagggaactaactaaattatttcagtgactcccacatgccagacagcacagatatgtgaattatgttactgcctccaaattgcttggttttgtctggtgagaaactgaagctaatggcaaaaccagtatgtcttggtgtcaagatgtcgtggtcacaggcaaatcatgaaccctaccttttggggaacttggacctagctacttttctgatttaatttctaatgacaaaaatatctataataataacagattctgctgaaacacggtgttatttaattttttttcttttttgaatattccttgtagaaaaatctaaaaagaaatcaagcactatttaaacaacagcaacaataaactgagttgttttttaagtgtttttaagcattcagaaatcaaactgattgaagtacctctttgtttctttccattggagatgggtacagcttaatgaagaaacagaaatactaatcaaactcttcagaaagttatatacactgtccccataatttatattattagacaggacttctgaaagtaatagaattttcgggaaacttttaaagcatggaagattcaagtcaaatgattcagaaaaagccaaaaaattgtttttaaaatagaaagtaagactaaaggccgggcgcggtggctcacgcctgtaatcccagcactttgggaggctgaggcaggcagattacgaggtcaggagattgagaccatcttggctaacatggtgaaaccccgtctctagtaaaaatacaaaaaattagctggacatggtggcgggcacctgtagtccctgctactcgggaggctgaggcaggagaatggcgtgaacccgggaggcggagcttgcagtgagccgagatggtgccactgcactccagcctgggcgacagggcgagactctgtctcaaaaaaaaaagaaagaaagaaagaaagaaagtaagtaagactagaaacatagaaattattgtatgaaagagtactgttttaaatgacatttctgcaaaggggactatggcattcttgtacacatttaagtaacattaaaattatttgtcttatagaaagtttaatgtgggaatttaattggcaatgttggtgggaagaaaaaaattaagattacacatgtgacattactttttttatttttatttttctttgagacaggatctcactcagtcacccaggctgcagtttcatgcgaacacggcttactgcagcctttacctcctcccaggctcaagcgatcctcccaccttagcctcccatgtagctgggaccacaggtgtgcaccactattcccagctaatgtctctgtttttttatagaggtgaggtctcacaacttttttgactgttttttgttttttttgtagagatggggtatccccatgttcttatgttgcccaggctggtcttgaactcctggactcaattaatcctcctgacttggcctcccaaagcgctgggattacaggtgtgagccaccatgcctggccattactttttaaactgcaaaatactattctactttcagtgaccacagaactacttttctttattcttaaaaatatttgcaaacattacgttctttaaacaaatatttttatacttaaaaaaactgcagtaaaatgtatatgaaatactactcatcattttaaccagttttaagtgtacaattcagtgtcattaattacattcacagtgttgtgcaaccatcaccattatctatttccaaagtgtttagatttttttattcataaagtattatcaaaaatggtcaaggagaccaggtgcagtggctcatgcttgtaaccccagcaatttgggaggctgagtctggtgaatcgcctgatgtcaggaattagagaccaatttgtccaaaatggcaaaaccctgtctctactaaaaacacaaaaatcagcctggcatgataatcggcacctgtaatcttagctactcaggaggctgaggcaggagaatcacgtgaacccaggaggcagaggttgcagttagctgagattgcaccactgtactccagcctgagtgacagcaagactccatctttaaaaaattgttttttagggtcgagcatggtggctcatgcctgtaatcccagcactttgggaggctggggcgggtggattgcctgaggtcaggagttcaagaccagcctggccaacatggtgaaatcccgtctctactaaaaatacaaaaaattagctgggcacggtggcaggcgcctgtaatctcagctacttgggaggctgaggcaggagaatcacttgaacctgagagatggaggttgccgagagccgagatcgcaccactgcactccagcctgagcagcaagagtgaaactctgtctcaaaaaaaaaaaagaaaaaaaatgtaagtaaaaataaattttaaaaatggtcaaagaaatgctttttcatatattacaattagtaatttaaacatgcaaatttatgctttctaataatttaagttaattgtagtttacttactaataggttgttcttgattttatattgtagtttaatagctttatttattattattattacttttttttttttttgagacggagtcttgctgtgtcacccaggctgtagtgccatggtgagatcttggctaactgcaacgtctgcctcctggattcaagcaattctctgcctcagcctcccgagtagctgggattacaggcgcccccccaccatgccctgctaatttttgtatttttagaagagacaggtttctccatcttggtcaggctggtcttgaactcctgacctcatgatccacccacctcggcctcccaaagtgctgggattacaggtgtcagacaccgcgcctggcctgatagctttactaaggaaaaaaatgaacactgtatataaatagtgttgtgtaaaacactattttacatagttccaatagccgttgcaagaaaaaaagtttaactagcttattgaatattttgaaatcactcagcattttatatttatatttacaaacagccccttaaaccacatcaaacaacaaactgatcttttgaactcgtgtttctttagtttgaattaataaatttgattaacataaagacacaaacatattgcatagattattattaaactttttaggaccgtaataatttcacataacatttttttaggaaaaaaaattccaaaacaaacacgctagatctaacaacagtatttaattaaagtaaaattaggctaatgagataaattggccctctctccactatcctcttaccatattattggtttaaacattaagaacttcctaaattaaaacagaagctgaatatttttctgtgacttttcagacttgaatgcccagatttgagtacatatggaggtcctggaaccaatctctagcatataccatgggacacctgtggtaccaacccttaatgagatgcattccaagtgtgttcattgtttctgacttggctttatgaagagcttgttttgcaggcataaatagaaaatactacaaatataactcataaaattgccactcaaattatgtcacatgcttacctctgaaaaccagtatcaagaaaattatgaaacagaatcaagtgaaaaaagacttcttcccctgcattaactgttcacttattttcacgagaatctgtgattctgtagaaagcttgaggcagtatttctaaaaccaaaacaaggagaaatatgaaaataaatatttggataatttacatcctaaaggagaaaaactgtacactgattcattcattgagtggatattaattcactcatattagaacacactctggattattcatttcactttgttctatgttaggaaatccatttactcaatccttcagaatacccaaatatgaatatcttcctaatcagttttaaagaccactatagcatcagtggactgtgtgttttctggatccaaattcataggtagattctatggaagatataatagagttataaaaagtgatccctgtcctcaaactaagactaacccacattgatctaacacacacttggatgatatatgatgtcatatctcatttagtgctcaacaatgtggtttagaccctatataaaaagagtacagtaaataactagctttaagattgctgatggcagtgaaaagcctggatacttttattcaaattcatgagtgtttaagttcaatcatatctgttgctatcaaataaagtaattaatcactaaagtaggtctacatggcataaaatgcagtaggatgttgaaaatttaagttaaaatcaaggcagggcagatcactgactcattaacttgtggactgccttgatcatgaccatcttgattaaaagcatttatcaactgcccacttgctgtgcacacgtacatactaggaatcctcactgtgttctaaaagggtcattgtattagtgagtgtttgctggttccaagcaacaattaccaactggttaggaggttttcaaagccaagaggccccattttgtggatgctgtggaacacacctaacaactggccccctgccccgaccccaccaccatggatgctcagaaagaacactagaagtgagtcacaggatctttccaacactgagggattccaatccttgatctgcctgtccattgcagtgactattttgtaaaaggaagctcctaacttggtactgcctatgtacaacagtttgtctcaggacagttcctgtttacatctattttctcagcgtattgctaacagcactcacttttactctcaaagtttagaaaataaattgacactttacctgcaccctagatcggacaacctggttgaaatgcacttcatgggttgccttgcaggagaaattttatcattgaattatcacaacatccttccagaacaaatatcccaaacaggaaaacttttctgtatctggtaaaattaaccttttttccccttatttatctatggtgacccataatagctttcatcttctattttatcagtcaaccaattatggaaatttatagcaattaaggacatatgtgtctgagtttgtgtgaggctgaactgggtagattttaaggtttataaattttagatatatcttcatgaaaatgaatgtagcatggctatgcctgctttaagtagacaaagagcatagcagaaggatgtgaatagatggcaaaactgatggaataatggagaacttggctttaaaaactcttatttattggttattcctattgattcttccagcaggagacaatcataggtctatttaggtcactgttgctgaaatcaatgatcaccaactatctttccattcttgtattacttctcacaagattcagaacccaaacgagagaaaccaaaaattttcccttgatttgtatccctaccctgtgcctataaaaagacatggggtcttatcttaccatctcattaagcccttgcccaatggatgagaggtaattgaaaacttaaaaagaaatagaattaactcccgtgtgtcaagtctttctcaaagtcactaaaaataatataatccatctttagatgtggaaaactgctggatatataatatcctctttttcttccattttttcaagaatattttgattcctaaagtatcttaaagcttgctgtggtggtacgtgcgcataaaagcagtaattagtaagaaccagaaatatttgtcacattgcggaagagtgtaatctaaacagaataacgatgataacaaaataatgtacatgtacgataggtactacattggatggccagggctgctgtagcaaagtagcacagacggtggtttaaacaacagaaaagtattaccttgtaattctagaggctagaattccaaaatcaaggtgtgagcagggacggtaccttctgagggctggatctgtttcaggcctctttatttgacttgtagatggcatcctctctctgtctctctcatcttccctgtacgtatttctgtttctgactaaatttcccctttttgaaggacaccaatcatactggaattcagacctacccaaatcacctcatttcaacttgtgcctataaagacccctagctctaaataaggtcacattctgaggtactggggttaggattccaacatgtcttctttgagagacacaatacaacccataacaagttcttaaattatggccaaatgaaagtgatccataaaaatgaaatgattaccaccagtatatttgagattaagagatgaattgctaatctatctttcttatattacatgactaatatggagaaagaaattgtttaaatataaccaaggcatcgtccgttattctcaatggagatgcttgaaatatattgtattctcatagtcttcttgtaccttcactaacacttttcttaaacatatattgtatgaaaataagaataaagaaattactgacattgtaaatttaatgaaaatctaataagaaaatgtaggaataatgaattgggaaaggaataatacaaaagcaaaaaaaaaaaaaaggtactgtaataaagctagtggagtctttctgttctctggtttttaggacctagaaactagctatgtgccaggaagaaatctatgaacaaaaccagtatagacttttctgagctaaaatgagaagttagatgaggaaatttgcgttgagcactacttatcatttaagcaccattgagcaataagcagcatggatttacacggaacaaatcatgccaaacaaatctgattgctttttttttttattgaattacaagattagtggatgaatgcaatgtgagagatgtaatacatttggattttagcaaaaacatttgatacagcatctcatgcactctaaaacgaattcaaatagtcaggaatgttaacagcaaggtaaggaagggaaattaaatgaaggattgcaaagaaaaagaagtgataatcaaccgtgatatggcagcttgggaacacatcattataaggtactatagtgatcacagggtttattcagtacctattaacattcacactgctttcttgggcttgataagaagaaacggaataaaggacttagaatgcaccccatgactacagacaatatatacaatcaatccagatttagagaaagaagaaaatagattttgcctcaaagatttttgctgctgttgaaagttacttatattactaactcatttattcacttcatgccctaaaattcggtcgtggatgcctttatttggcttttcttgtgtcttaggacaagccaattttttcagtcatccaatcttcctggtctaatactaaggatccatggaaaagatgtcagaggcactcttggtttcttgactttttagtgatgaggatacttggattccaccagagtctgtggatgctttatgtaagatactgccctcaaggtgaaagttaaatatgataattaaataaggagaaggcagtagaaatattctaaccaaattcacagttgatacaaggtgctactagaagcagtgaggccagtaaaatt

SEQ ID NO: 297 - DNA, 4055 bp, Homo sapiens
accccctgcttggttgcaccctcagatagtacccatgagcttcactgttcagcctcggggcccaggcgcttcctggaatctctccttggccggggttaaaatgcagttcccgctcaaaatgcctctaggttgatagaagtccagatcctgaggaaatctccagctaaatgctcaaaatataaaaactgagctgagatttgcgaagagcagcagcatggatggattttatgaccagcaagtgccttacatggtcaccaatagtcagcgtgggagaaattgtaacgagaaaccaacaaatgtcaggaaaagaaaattcattaacagagatctggctcatgattcagaagaactctttcaagatctaagtcaattacaggaaacatggcttgcagaagtggcttttcatggcctgccactgaaaatcaagaaagaaccccacagtccatgttcagaaatcagctctgcctgcagtcaagaacagccctttaaattcagctatggagaaaagtgcctgtacaatgtcagtgcctatgatcagaagccacaagtgggaatgaggccctccaacccccccacaccatccagcacgccagtgtccccactgcatcatgcatctccaaactcaactcatacaccgaaacctgaccgggccttcccagctcacctccctccatcgcagtccataccagatagcagctaccccatggaccacagatttcgccgccagctttctgaaccctgtaactcctttcctcctttgccgacgatgccaagggaaggacgtcctatgtaccaacgccagatgtctgagccaaacatccccttcccaccacaaggctttaagcaggagtaccacgacccagtgtatgaacacaacaccatggttggcagtgcggccagccaaagctttccccctcctctgatgattaaacaggaacccagagattttgcatatgactcagaagtgcctagctgccactccatttatatgaggcaagaaggcttcctggctcatcccagcagaacagaagctgtatgtttgaaaagggccccaggcagttttatgatgacacctgtgttgtcccagaaaaattcgatggagacatcaaacaagagccaggaatgtatcgggaaggacccacataccaacggcgaggatcacttcagctctggcagtttttggtagctcttctggatgacccttcaaattctcattttattgcctggactggtcgaggcatggaatttaaactgattgagcctgaagaggtggcccgacgttggggcattcagaaaaacaggccagctatgaactatgataaacttagccgttcactccgctattactatgagaaaggaattatgcaaaaggtggctggagagagatatgtctacaagtttgtgtgtgatccagaagcccttttctccatggcctttccagataatcagcgtccactgctgaagacagacatggaacgtcacatcaacgaggaggacacagtgcctctttctcactttgatgagagcatggcctacatgccggaagggggctgctgcaacccccacccctacaacgaaggctacgtgtattaacacaagtgacagtcaagcagggcgtttttgcgcttttccttttttctgcaagatacagagaattgctgaatctttgttttatttctgttgtttgtattttatttttaaataataatacacaaaaaggggcttttcctgttgcattattctatggtctgccatggactgtgcactttatttgagggtgggtgggagtaatctaaacatttattctgtgtaacaggaagctaatgggtgaatgggcagagggatttggggattactttttacttaggcttgggatggggtcctacaagttttgagtatgatgaaactatatcatgtctgtttgatttcataacaacataagataatgtttattttatcggggtatctatggtacagttaatttcacgttgtgtaaatatccacttggagactatttgccttgggcattttcccctgtcatttatgagtctctgcaggtgtacaaaaaaaccccaatctactgtaaatggcagtttaattgttagaaatgactgtttttgcaccacttgtaaaaaggtatttagcgattgcatttgctgtttgttgttttattttgctttatatatgacttgcagaggataaccataaaatgggtaattctctctgaagttgaataatcaccatgactgtaaatgaggggcacaattttggactctggcgccaaactgagtcataggccagtagcattacgtgtatctggtgccaccttgctgtttagatacaaatcataccgtcttttaaatattttgaagcccatttcagttaaataatgacatgtcatggtcctttggaatcttcatttaaatgttaaatctggaatcaaaatgaagcaaaaaatatctgtctccttttcactttcttcagtacataaatacattatttaatcaataagaattaactgtactaaatcatgtattatgctgttctagttacagcaaacactctttaagaaaaatatccaatacactaaataggtactatagtaatttttagacatggtacccattgatatgcatttaaaccttttactgctgtgttatgttgataacatatataaatattagataatgctaatgcttctgctgctgtcttttctgtaatattctctttcatgctgaatttactatgaccatttataagcagtgcagttaactacagatagcatttcaggacaaaatagatgactcaaaccatttattgcttaaaaaatagcttacgccatgctatgctataagcagcttttatgcacattgacaaatgaagagtaagcttcagcttgctaaaggaaactgtggaaccttttgtaacttttggtgatatggaaaattatttacaaaccgtcaaagaatatgaggaagttgctgtatgacatagtgctggcactgatattatccatcatctctttttggacacttctgtaaatgtgattggattgtttgaaagaagatttaaagtttcaaagttttttgttctgtttttgctttgcatttggagaaaatattgaaagcagggtatgttgtttcattcaccttgaaaaaaccatgagtaaatggggatatagaatctctgaatagctcgctaaaagattcaagcaagggacatgaattttgttccatctatcaataatatccagaagaacaacttttttaaagagtctatagcaaaaagcaaaaaaaaaaaaaaattctaaacacaaagtcaaaataaacctattgtaaaagcatttcgtgatgagcatgaaaaagattgtttaaagatgatccccccagctacccattttccaaaactacacagatcacagctcatttctctaagtggagcagttatcaagaaacccaaacaccaaaattgctactcttcacatttaatcctacaaaaagtactccaatttcaaaatatgtatgtaacctgcgatttcaatgattgttgttcatatacatcatgtattattttggcccattttgggcctaaaaaagaaaactatgccttaaaaatcagaaccttttctccccactatgcttatgtggccatctacagcacttagaataaaaacagatgttaaaatattcagtgaaagttttattggaaaaaggaattgagatatataattgagatttggtgaaattgaaggagaaaatttaagtgagtctttaaaatatattctgaatgaaaactgtattgaggattcatttttgttccttttttttctttttctcttttctcctttttcttctttttaatagtctagttttagtcagtcagtgaggaagaattgggccatgctaacgttatcacaagagaacaatggcagaaatggtattagttatataatatttaaggacaaactatatgttttgctgttttaacgtagtgactcactgaactaaatacataattgaccaacattaagtgtatttccaatacagaagggttga

SEQ ID NO: 298 - protein, 308 aa, Homo sapiens
MVTNSQRGRNCNEKPTNVRKRKFINRDLAHDSEELFQDLSQLQETWLAEVAFHGLPLKIKKEPHSPCSEISSACSQEQPFKFSYGEKCLYNVSAYDQKPQVGMRPSNPPTPSSTPVSPLHHDNSTHTPKPDRAFPAHLPPSQSIPDSSYPMDHRFRRQLSEPCNSFPPLPTMPREGRPMYQRQMSEPNIPFPPQGFKQEYHDPVYEHNTMVGSAASQSFPPPLMIKQEPRDFAYDSEVPSCHSIYMRQEGFLAHPSRTEAVCLKRAPGSFMMTPVLSQKNSMSNKSQECIGKDPHTNGEDHFSSGSFW

SEQ ID NO: 299 - DNA, 3790 bp, Homo sapiens
gttcatcaggacgggatgcttcaagatttaagtgcaagtgtcttctttcctccttgttcacaacacagaacgttagctcaggtacctgacaatgatgagcagtttgtaccagactatcaggctgaaagtttggcttttcatggcctgccactgaaaatcaagaaagaaccccacagtccatgttcagaaatcagctctgcctgcagtcaagaacagccctttaaattcagctatggagaaaagtgcctgtacaatgtcagtgcctatgatcagaagccacaagtgggaatgaggccctccaacccccccacaccatccagcacgccagtgtccccactgcatcatgcatctccaaactcaactcatacaccgaaacctgaccgggccttcccagctcacctccctccatcgcagtccataccagatagcagctaccccatggaccacagatttcgccgccagctttctgaaccctgtaactcctttcctcctttgccgacgatgccaagggaaggacgtcctatgtaccaacgccagatgtctgagccaaacatccccttcccaccacaaggctttaagcaggagtaccacgacccagtgtatgaacacaacaccatggttggcagtgcggccagccaaagctttccccctcctctgatgattaaacaggaacccagagattttgcatatgactcagaagtgcctagctgccactccatttatatgaggcaagaaggcttcctggctcatcccagcagaacagaagctgtatgtttgaaaagggccccaggcagttttatgatgacacctgtgttgtcccagaaaaattcgatggagacatcaaacaagagccaggaatgtatcgggaaggacccacataccaacggcgaggatcacttcagctctggcagtttttggtagctcttctggatgacccttcaaattctcattttattgcctggactggtcgaggcatggaatttaaactgattgagcctgaagaggtggcccgacgttggggcattcagaaaaacaggccagctatgaactatgataaacttagccgttcactccgctattactatgagaaaggaattatgcaaaaggtggctggagagagatatgtctacaagtttgtgtgtgatccagaagcccttttctccatggcctttccagataatcagcgtccactgctgaagacagacatggaacgtcacatcaacgaggaggacacagtgcctctttctcactttgatgagagcatggcctacatgccggaagggggctgctgcaacccccacccctacaacgaaggctacgtgtattaacacaagtgacagtcaagcagggcgtttttgcgcttttccttttttctgcaagatacagagaattgctgaatctttgttttatttctgttgtttgtattttatttttaaataataatacacaaaaaggggcttttcctgttgcattattctatggtctgccatggactgtgcactttatttgagggtgggtgggagtaatctaaacatttattctgtgtaacaggaagctaatgggtgaatgggcagagggatttggggattactttttacttaggcttgggatggggtcctacaagttttgagtatgatgaaactatatcatgtctgtttgatttcataacaacataagataatgtttattttatcggggtatctatggtacagttaatttcacgttgtgtaaatatccacttggagactatttgccttgggcattttcccctgtcatttatgagtctctgcaggtgtacaaaaaaaccccaatctactgtaaatggcagtttaattgttagaaatgactgtttttgcaccacttgtaaaaaggtatttagcgattgcatttgctgtttgttgttttattttgctttatatatgacttgcagaggataaccataaaatgggtaattctctctgaagttgaataatcaccatgactgtaaatgaggggcacaattttggactctggcgccaaactgagtcataggccagtagcattacgtgtatctggtgccaccttgctgtttagatacaaatcataccgtcttttaaatattttgaagcccatttcagttaaataatgacatgtcatggtcctttggaatcttcatttaaatgttaaatctggaatcaaaatgaagcaaaaaatatctgtctccttttcactttcttcagtacataaatacattatttaatcaataagaattaactgtactaaatcatgtattatgctgttctagttacagcaaacactctttaagaaaaatatccaatacactaaataggtactatagtaatttttagacatggtacccattgatatgcatttaaaccttttactgctgtgttatgttgataacatatataaatattagataatgctaatgcttctgctgctgtcttttctgtaatattctctttcatgctgaatttactatgaccatttataagcagtgcagttaactacagatagcatttcaggacaaaatagatgactcaaaccatttattgcttaaaaaatagcttacgccatgctatgctataagcagcttttatgcacattgacaaatgaagagtaagcttcagcttgctaaaggaaactgtggaaccttttgtaacttttggtgatatggaaaattatttacaaaccgtcaaagaatatgaggaagttgctgtatgacatagtgctggcactgatattatccatcatctctttttggacacttctgtaaatgtgattggattgtttgaaagaagatttaaagtttcaaagttttttgttctgtttttgctttgcatttggagaaaatattgaaagcagggtatgttgtttcattcaccttgaaaaaaccatgagtaaatggggatatagaatctctgaatagctcgctaaaagattcaagcaagggacatgaattttgttccatctatcaataatatccagaagaacaacttttttaaagagtctatagcaaaaagcaaaaaaaaaaaaaaattctaaacacaaagtcaaaataaacctattgtaaaagcatttcgtgatgagcatgaaaaagattgtttaaagatgatccccccagctacccattttccaaaactacacagatcacagctcatttctctaagtggagcagttatcaagaaacccaaacaccaaaattgctactcttcacatttaatcctacaaaaagtactccaatttcaaaatatgtatgtaacctgcgatttcaatgattgttgttcatatacatcatgtattattttggcccattttgggcctaaaaaagaaaactatgccttaaaaatcagaaccttttctccccactatgcttatgtggccatctacagcacttagaataaaaacagatgttaaaatattcagtgaaagttttattggaaaaaggaattgagatatataattgagatttggtgaaattgaaggagaaaatttaagtgagtctttaaaatatattctgaatgaaaactgtattgaggattcatttttgttccttttttttctttttctcttttctcctttttcttctttttaatagtctagttttagtcagtcagtgaggaagaattgggccatgctaacgttatcacaagagaacaatggcagaaatggtattagttatataatatttaaggacaaactatatgttttgctgttttaacgtagtgactcactgaactaaatacataattgaccaacattaagtgtatttccaatacagaagggttga

SEQ ID NO: 300 - protein, 297 aa, Homo sapiens
MLQDLSASVFFPPCSQHRTLAQVPDNDEQFVPDYQAESLAFHGLPLKIKKEPHSPCSEISSACSQEQPFKFSYGEKCLYNVSAYDQKPQVGMRPSNPPTPSSTPVSPLHHDNSTHTPKPDRAFPAHLPPSQSIPDSSYPMDHRFRRQLSEPCNSFPPLPTMPREGRPMYQRQMSEPNIPFPPQGFKQEYHDPVYEHNTMVGSAASQSFPPPLMIKQEPRDFAYDSEVPSCHSIYMRQEGFLAHPSRTEAVCLKRAPGSFMMTPVLSQKNSMSNKSQECIGKDPHTNGEDHFSSGSFW

SEQ ID NO: 301 - DNA, 4121 bp, Homo sapiens
agaagtagaggaaaaaccaccgaattgagctctgtcagaggcgctttcggcttccaagggggaagtgctgggctataattaatgtttttattaaatttggagggaagtttttgcagcctttcgcctagcgtggccttcaggttgatagaagtccagatcctgaggaaatctccagctaaatgctcaaaatataaaaactgagctgagatttgcgaagagcagcagcatggatggattttatgaccagcaagtgccttacatggtcaccaatagtcagcgtgggagaaattgtaacgagaaaccaacaaatgtcaggaaaagaaaattcattaacagagatctggctcatgattcagaagaactctttcaagatctaagtcaattacaggaaacatggcttgcagaagctcaggtacctgacaatgatgagcagtttgtaccagactatcaggctgaaagtttggcttttcatggcctgccactgaaaatcaagaaagaaccccacagtccatgttcagaaatcagctctgcctgcagtcaagaacagccctttaaattcagctatggagaaaagtgcctgtacaatgtcagtgcctatgatcagaagccacaagtgggaatgaggccctccaacccccccacaccatccagcacgccagtgtccccactgcatcatgcatctccaaactcaactcatacaccgaaacctgaccgggccttcccagctcacctccctccatcgcagtccataccagatagcagctaccccatggaccacagatttcgccgccagctttctgaaccctgtaactcctttcctcctttgccgacgatgccaagggaaggacgtcctatgtaccaacgccagatgtctgagccaaacatccccttcccaccacaaggctttaagcaggagtaccacgacccagtgtatgaacacaacaccatggttggcagtgcggccagccaaagctttccccctcctctgatgattaaacaggaacccagagattttgcatatgactcagaagtgcctagctgccactccatttatatgaggcaagaaggcttcctggctcatcccagcagaacagaagctgtatgtttgaaaagggccccaggcagttttatgatgacacctgtgttgtcccagaaaaattcgatggagacatcaaacaagagccaggaatgtatcgggaaggacccacataccaacggcgaggatcacttcagctctggcagtttttggtagctcttctggatgacccttcaaattctcattttattgcctggactggtcgaggcatggaatttaaactgattgagcctgaagaggtggcccgacgttggggcattcagaaaaacaggccagctatgaactatgataaacttagccgttcactccgctattactatgagaaaggaattatgcaaaaggtggctggagagagatatgtctacaagtttgtgtgtgatccagaagcccttttctccatggcctttccagataatcagcgtccactgctgaagacagacatggaacgtcacatcaacgaggaggacacagtgcctctttctcactttgatgagagcatggcctacatgccggaagggggctgctgcaacccccacccctacaacgaaggctacgtgtattaacacaagtgacagtcaagcagggcgtttttgcgcttttccttttttctgcaagatacagagaattgctgaatctttgttttatttctgttgtttgtattttatttttaaataataatacacaaaaaggggcttttcctgttgcattattctatggtctgccatggactgtgcactttatttgagggtgggtgggagtaatctaaacatttattctgtgtaacaggaagctaatgggtgaatgggcagagggatttggggattactttttacttaggcttgggatggggtcctacaagttttgagtatgatgaaactatatcatgtctgtttgatttcataacaacataagataatgtttattttatcggggtatctatggtacagttaatttcacgttgtgtaaatatccacttggagactatttgccttgggcattttcccctgtcatttatgagtctctgcaggtgtacaaaaaaaccccaatctactgtaaatggcagtttaattgttagaaatgactgtttttgcaccacttgtaaaaaggtatttagcgattgcatttgctgtttgttgttttattttgctttatatatgacttgcagaggataaccataaaatgggtaattctctctgaagttgaataatcaccatgactgtaaatgaggggcacaattttggactctggcgccaaactgagtcataggccagtagcattacgtgtatctggtgccaccttgctgtttagatacaaatcataccgtcttttaaatattttgaagcccatttcagttaaataatgacatgtcatggtcctttggaatcttcatttaaatgttaaatctggaatcaaaatgaagcaaaaaatatctgtctccttttcactttcttcagtacataaatacattatttaatcaataagaattaactgtactaaatcatgtattatgctgttctagttacagcaaacactctttaagaaaaatatccaatacactaaataggtactatagtaatttttagacatggtacccattgatatgcatttaaaccttttactgctgtgttatgttgataacatatataaatattagataatgctaatgcttctgctgctgtcttttctgtaatattctctttcatgctgaatttactatgaccatttataagcagtgcagttaactacagatagcatttcaggacaaaatagatgactcaaaccatttattgcttaaaaaatagcttacgccatgctatgctataagcagcttttatgcacattgacaaatgaagagtaagcttcagcttgctaaaggaaactgtggaaccttttgtaacttttggtgatatggaaaattatttacaaaccgtcaaagaatatgaggaagttgctgtatgacatagtgctggcactgatattatccatcatctctttttggacacttctgtaaatgtgattggattgtttgaaagaagatttaaagtttcaaagttttttgttctgtttttgctttgcatttggagaaaatattgaaagcagggtatgttgtttcattcaccttgaaaaaaccatgagtaaatggggatatagaatctctgaatagctcgctaaaagattcaagcaagggacatgaattttgttccatctatcaataatatccagaagaacaacttttttaaagagtctatagcaaaaagcaaaaaaaaaaaaaaattctaaacacaaagtcaaaataaacctattgtaaaagcatttcgtgatgagcatgaaaaagattgtttaaagatgatccccccagctacccattttccaaaactacacagatcacagctcatttctctaagtggagcagttatcaagaaacccaaacaccaaaattgctactcttcacatttaatcctacaaaaagtactccaatttcaaaatatgtatgtaacctgcgatttcaatgattgttgttcatatacatcatgtattattttggcccattttgggcctaaaaaagaaaactatgccttaaaaatcagaaccttttctccccactatgcttatgtggccatctacagcacttagaataaaaacagatgttaaaatattcagtgaaagttttattggaaaaaggaattgagatatataattgagatttggtgaaattgaaggagaaaatttaagtgagtctttaaaatatattctgaatgaaaactgtattgaggattcatttttgttccttttttttctttttctcttttctcctttttcttctttttaatagtctagttttagtcagtcagtgaggaagaattgggccatgctaacgttatcacaagagaacaatggcagaaatggtattagttatataatatttaaggacaaactatatgttttgctgttttaacgtagtgactcactgaactaaatacataattgaccaacattaagtgtatttccaatacagaagggttga

SEQ ID NO: 302 - protein, 337 aa, Homo sapiens
MDGFYDQQVPYMVTNSQRGRNCNEKPTNVRKRKFINRDLAHDSEELFQDLSQLQETWLAEAQVPDNDEQFVPDYQAESLAFHGLPLKIKKEPHSPCSEISSACSQEQPFKFSYGEKCLYNVSAYDQKPQVGMRPSNPPTPSSTPVSPLHHDNSTHTPKPDRAFPAHLPPSQSIPDSSYPMDHRFRRQLSEPCNSFPPLPTMPREGRPMYQRQMSEPNIPFPPQGFKQEYHDPVYEHNTMVGSAASQSFPPPLMIKQEPRDFAYDSEVPSCHSIYMRQEGFLAHPSRTEAVCLKRAPGSFMMTPVLSQKNSMSNKSQECIGKDPHTNGEDHFSSGSFW

SEQ ID NO: 303 - DNA, 3935 bp, Homo sapiens
aagccatcttgttcccctctaggttgatagaagtccagatcctgaggaaatctccagctaaatgctcaaaatataaaaactgagctgagatttgcgaagagcagcagcatggatggattttatgaccagcaagtgccttacatggtcaccaatagtcagcgtgggagaaattgtaacgagaaaccaacaaatgtcaggaaaagaaaattcattaacagagatctggctcatgattcagaagaactctttcaagatctaagtcaattacaggaaacatggcttgcagaagctcaggtacctgacaatgatgagcagtttgtaccagactatcaggctgaaagtttggcttttcatggcctgccactgaaaatcaagaaagaaccccacagtccatgttcagaaatcagctctgcctgcagtcaagaacagccctttaaattcagctatggagaaaagtgcctgtacaatgtcagtgcctatgatcagaagccacaagtgggaatgaggccctccaacccccccacaccatccagcacgccagtgtccccactgcatcatgcatctccaaactcaactcatacaccgaaacctgaccgggccttcccagctcacctccctccatcgcagtccataccagatagcagctaccccatggaccacagatttcgccgccagctttctgaaccctgtaactcctttcctcctttgccgacgatgccaagggaaggacgtcctatgtaccaacgccagatgtctgagccaaacatccccttcccaccacaaggctttaagcaggagtaccacgacccagtgtatgaacacaacaccatggttggcagtgcggccagccaaagctttccccctcctctgatgattaaacaggaacccagagattttgcatatgactcaggctgtatgtttgaaaagggccccaggcagttttatgatgacacctgtgttgtcccagaaaaattcgatggagacatcaaacaagagccaggaatgtatcgggaaggacccacataccaacggcgaggatcacttcagctctggcagtttttggtagctcttctggatgacccttcaaattctcattttattgcctggactggtcgaggcatggaatttaaactgattgagcctgaagaggtggcccgacgttggggcattcagaaaaacaggccagctatgaactatgataaacttagccgttcactccgctattactatgagaaaggaattatgcaaaaggtggctggagagagatatgtctacaagtttgtgtgtgatccagaagcccttttctccatggcctttccagataatcagcgtccactgctgaagacagacatggaacgtcacatcaacgaggaggacacagtgcctctttctcactttgatgagagcatggcctacatgccggaagggggctgctgcaacccccacccctacaacgaaggctacgtgtattaacacaagtgacagtcaagcagggcgtttttgcgcttttccttttttctgcaagatacagagaattgctgaatctttgttttatttctgttgtttgtattttatttttaaataataatacacaaaaaggggcttttcctgttgcattattctatggtctgccatggactgtgcactttatttgagggtgggtgggagtaatctaaacatttattctgtgtaacaggaagctaatgggtgaatgggcagagggatttggggattactttttacttaggcttgggatggggtcctacaagttttgagtatgatgaaactatatcatgtctgtttgatttcataacaacataagataatgtttattttatcggggtatctatggtacagttaatttcacgttgtgtaaatatccacttggagactatttgccttgggcattttcccctgtcatttatgagtctctgcaggtgtacaaaaaaaccccaatctactgtaaatggcagtttaattgttagaaatgactgtttttgcaccacttgtaaaaaggtatttagcgattgcatttgctgtttgttgttttattttgctttatatatgacttgcagaggataaccataaaatgggtaattctctctgaagttgaataatcaccatgactgtaaatgaggggcacaattttggactctggcgccaaactgagtcataggccagtagcattacgtgtatctggtgccaccttgctgtttagatacaaatcataccgtcttttaaatattttgaagcccatttcagttaaataatgacatgtcatggtcctttggaatcttcatttaaatgttaaatctggaatcaaaatgaagcaaaaaatatctgtctccttttcactttcttcagtacataaatacattatttaatcaataagaattaactgtactaaatcatgtattatgctgttctagttacagcaaacactctttaagaaaaatatccaatacactaaataggtactatagtaatttttagacatggtacccattgatatgcatttaaaccttttactgctgtgttatgttgataacatatataaatattagataatgctaatgcttctgctgctgtcttttctgtaatattctctttcatgctgaatttactatgaccatttataagcagtgcagttaactacagatagcatttcaggacaaaatagatgactcaaaccatttattgcttaaaaaatagcttacgccatgctatgctataagcagcttttatgcacattgacaaatgaagagtaagcttcagcttgctaaaggaaactgtggaaccttttgtaacttttggtgatatggaaaattatttacaaaccgtcaaagaatatgaggaagttgctgtatgacatagtgctggcactgatattatccatcatctctttttggacacttctgtaaatgtgattggattgtttgaaagaagatttaaagtttcaaagttttttgttctgtttttgctttgcatttggagaaaatattgaaagcagggtatgttgtttcattcaccttgaaaaaaccatgagtaaatggggatatagaatctctgaatagctcgctaaaagattcaagcaagggacatgaattttgttccatctatcaataatatccagaagaacaacttttttaaagagtctatagcaaaaagcaaaaaaaaaaaaaaattctaaacacaaagtcaaaataaacctattgtaaaagcatttcgtgatgagcatgaaaaagattgtttaaagatgatccccccagctacccattttccaaaactacacagatcacagctcatttctctaagtggagcagttatcaagaaacccaaacaccaaaattgctactcttcacatttaatcctacaaaaagtactccaatttcaaaatatgtatgtaacctgcgatttcaatgattgttgttcatatacatcatgtattattttggcccattttgggcctaaaaaagaaaactatgccttaaaaatcagaaccttttctccccactatgcttatgtggccatctacagcacttagaataaaaacagatgttaaaatattcagtgaaagttttattggaaaaaggaattgagatatataattgagatttggtgaaattgaaggagaaaatttaagtgagtctttaaaatatattctgaatgaaaactgtattgaggattcatttttgttccttttttttctttttctcttttctcctttttcttctttttaatagtctagttttagtcagtcagtgaggaagaattgggccatgctaacgttatcacaagagaacaatggcagaaatggtattagttatataatatttaaggacaaactatatgttttgctgttttaacgtagtgactcactgaactaaatacataattgaccaacattaagtgtatttccaatacagaagggttga

SEQ ID NO: 304 - protein, 450 aa, Homo sapiens
MDGFYDQQVPYMVTNSQRGRNCNEKPTNVRKRKFINRDLAHDSEELFQDLSQLQETWLAEAQVPDNDEQFVPDYQAESLAFHGLPLKIKKEPHSPCSEISSACSQEQPFKFSYGEKCLYNVSAYDQKPQVGMRPSNPPTPSSTPVSPLHHDNSTHTPKPDRAFPAHLPPSQSIPDSSYPMDHRFRRQLSEPCNSFPPLPTMPREGRPMYQRQMSEPNIPFPPQGFKQEYHDPVYEHNTMVGSAASQSFPPPLMIKQEPRDFAYDSGCMFEKGPRQFYDDTCVVPEKFDGDIKQEPGMYREGPTYQRRGSLQLWQFLVLDDPSNSHFIAWTGRGMEFKLIEPEEVARRWGIQKNRPAMNYDKLSRSLRYYYEKGIMQKVAGERYVYKFVCDPEALFSMAFPDNQRPLLKTDMERHINEEDTVPLSHFDESMAYMPEGGCCNPHPYNEGYVY
